(19) United States
(12) Patent Application Publication
(10) Pub. No.: US 2022/0370498 A1
(43) Pub. Date: Nov. 24, 2022

(54) IMMUNE CELLS EXPRESSING RECEPTOR SPECIFIC TO CLASS I MHC MOLECULE AND INTERFERING RNA FOR HLA GENE

(71) Applicant: A2 Biotherapeutics, Inc., Agoura Hills, CA (US)

(72) Inventors: Agnes E. HAMBURGER, Newbury Park, CA (US); Carl Alexander KAMB, Westlake Village, CA (US); Breanna DIANDRETH, Agoura Hills, CA (US)

(21) Appl. No.: 17/721,134

(22) Filed: Apr. 14, 2022

Related U.S. Application Data
(60) Provisional application No. 63/175,987, filed on Apr. 16, 2021.

(51) Int. Cl. A61K 35/17; C07K 14/725; C07K 16/28

(52) U.S. Cl. CPC A61K 35/17; C07K 14/7051; C07K 16/2809; C07K 16/2833; A61K 2039/507

(57) ABSTRACT

The disclosure relates to immune cells for use in adoptive cell therapy that express an inhibitory receptor, useful for treating a disease or disorder, for example, cancer. The disclosure provides immune cells with reduced or eliminated HLA expression, that express an inhibitory receptor, methods of making same, shRNAs targeting HLA-A mRNA, and polynucleotides and vectors encoding same.

### CROSS REFERENCE TO RELATED APPLICATIONS

[0001] The present application claims priority to, and benefit of, U.S. Provisional Application No. 63/175,987, filed on Apr. 16, 2021, the contents of which are incorporated by reference in their entirety herein.

### INCORPORATION BY REFERENCE OF SEQUENCE LISTING

[0002] The present application is being filed with a Sequence Listing in electronic format. The Sequence Listing is provided as a file entitled A2BI_028_01US_SeqList_ST25.txt, created on Apr. 11, 2022 and is 1,708 kilobytes in size. The information in electronic format of the Sequence Listing is incorporated by reference in its entirety.

### BACKGROUND

[0003] Cell therapy is a powerful tool for the treatment of various diseases, particularly cancers. In conventional adoptive cell therapies, immune cells are engineered to express specific receptors, for example chimeric antigen receptors (CARs) or T Cell Receptors (TCRs), which direct the activity of the immune cells to cellular targets via interaction of the receptor with a ligand expressed by the target cell. Transplant of donor-derived T cells may be used to treat solid tumors and hematological malignancies. For example, T cells genetically modified to express a chimeric antigen receptor specific to CD19 effectively treat B-cell lymphoma when transplanted into patients. Specificity of transplanted T cells for target cells, such as cancer cells, can be increased by modifying the cells to express not only a first activator receptor specific to a target cell type, but also a second inhibitory receptor that prevents activation of the immune cells by non-target cells that express the ligand for the inhibitory receptor. The presence of an inhibitory receptor can result in unintentional inactivation or activation of the immune cell through autocrine binding/signaling mechanisms, or failure of the inhibitory mechanism by in cis blocking from the endogenous antigen for the inhibitory receptor. Autocrine signaling-mediated inactivation/activation of an immune cell used in cell therapy reduces the therapy's efficacy and raises the risk of unchecked activation. Thus, there remains a need for immune cells that express inhibitory receptors and are not functionally affected through autocrine signaling mechanisms.

[0004] The disclosure provides compositions and methods to reduce autocrine signaling in, increase the efficacy and safety of, and reduce potential complications of, immune cells that have been engineered to express a combination of activator and inhibitor receptors that specifically direct the transplanted immune cells to target particular cells, such as cancer cells.

### SUMMARY

[0005] The disclosure generally relates to immune cells expressing engineered receptors for use in adoptive cell therapy. Immune cells of the disclosure have restored receptor function/signaling that would otherwise be compromised by binding of an engineered receptor, for example an inhibitory receptor, to an HLA-A*02 ligand expressed by the immune cell. This autocrine signaling can be reduced or eliminated by expression of a HLA-targeting interfering RNA by the immune cell.

[0006] Accordingly, the disclosure provides immune cells comprising an inhibitory receptor comprising a ligand binding domain specific to a class I major histocompatibility complex (MHC-I) molecule, or a peptide-MHC complex thereof, wherein expression and/or function of HLA-A in said immune cell has been reduced or eliminated.

[0007] In some embodiments of the immune cells of the disclosure, the immune cell comprises an interfering RNA, comprising a sequence complementary to a sequence of a HLA-A mRNA. In some embodiments, the interfering RNA is capable of inducing RNAi-mediated degradation of the HLA-A*02 mRNA. In some embodiments, the interfering RNA is a short hairpin RNA (shRNA). In some embodiments, the shRNA comprises (a) a first sequence, having from 5′ end to 3′ end a sequence complementary to the HLA-A*02 mRNA; and (b) a second sequence, having from 5′ end to 3′ end a sequence complementary to the first sequence, wherein the first sequence and the second sequence form the shRNA.

[0008] The disclosure provides pharmaceutical compositions comprising a plurality of the immune cells of the disclosure.

[0009] The disclosure provides methods of treating cancer with an adoptive cell therapy, comprising administering to the subject a plurality of the immune cells, or the pharmaceutical compositions, of the disclosure.

[0010] The disclosure provides vectors comprising the interfering RNA of the disclosure.

[0011] The disclosure provides vectors comprising an interfering RNA, wherein the interfering RNA comprises an shRNA that targets a HLA-A*02 mRNA sequence, wherein the shRNA comprises (a) a first sequence, having from 5′ to 3′ a sequence complementary to the HLA-A*02 mRNA; and (b) a second sequence, having from 5′ to 3′ end a sequence complementary to the first sequence, wherein the first sequence and the second sequence form the shRNA.

[0012] The disclosure provides methods of producing an immune cell with reduced autocrine binding/signaling comprising transducing and/or transfecting the immune cell with the vector of the disclosure. In some embodiments, the methods comprise transducing the immune cell with a first vector comprising a sequence encoding an activator receptor and a second vector comprising a sequence encoding an inhibitory receptor, thereby producing an immune cell expressing the activator and inhibitory receptors.

[0013] The disclosure provides methods of manufacturing a composition comprising immune cells with reduced autocrine binding/signaling comprising: (a) providing immune cells from a subject suffering from or at risk for cancer or a hematological malignancy; and (b) transducing and/or transfecting the immune cell with the vector of the disclosure.

[0014] The disclosure provides methods of treating a subject in need thereof comprising: (a) providing immune cells from a subject suffering from or at risk for cancer or a hematological malignancy; (b) transducing the immune cell with the vector of the disclosure; and (c) administering the immune cell to the subject.

### BRIEF DESCRIPTION OF THE DRAWINGS

[0015] A better understanding of the features and advantages of the present invention will be obtained by reference to the following detailed description that sets forth illustrative embodiments, in which the principles of the invention are utilized, and the accompanying drawings of which:

[0016] FIG. 1 is a diagram illustrating hemizygous tumor cells forming a tumor against a background of heterozygous cells that compose normal tissue. The hemizygous tumor cells express only Target A, and have lost Target B due to loss of heterozygosity (LOH), while the normal cells express both Target A and Target B. This genetic difference can be exploited to create tumor-selective cytotoxic therapeutics that are blocked by Target B and activated by Target A, thereby selectively killing tumors.

[0017] FIG. 2A is a diagram showing an exemplary architecture of a dual targeted therapeutic based on LOH in tumors. In this example, there is cell-based integration of activator and blocker signals from two receptors.

[0018] FIG. 2B is a series of diagrams showing various activator and receptor formats and combinations.

[0019] FIG. 3A is a pair of diagrams that show exemplary dual receptor constructs of the disclosure in TCR format. In this example, activator and inhibitor (blocker) ligand binding domains (LBDs) are each fused separately to the CD3 gamma subunit of the TCR.

[0020] FIG. 3B is diagram and a table that show exemplary dual receptor constructs of the disclosure in CAR format. Exemplary ITIM and inhibitor domains of the inhibitor CAR are shown in the table at right.

[0021] FIG. 4A is a set of plots showing that engineered receptors with HLA-A*02 specific blocker ligand binding domains (LBDs) lose blocking ability in the presence of A*02+ donors (1) and A*02-blocker is expressed but occupied by HLA-A*02 cis interaction (2). An HLA-A*02-blocker binds to HLA-A*02 in cis and hinders blocker function in Jurkat and in primary T cells.

[0022] FIG. 4B is a diagram showing an autocrine signaling mechanism in an immune cell expressing an inhibitory receptor. The diagram shows that knockout of natively expressed MHC class I polypeptides reduces inhibition mediated by autocrine signaling.

[0023] FIG. 5 is a schematic showing illustrative regions of the HLA-A*02 mRNA targeted by interfering shRNAs of the disclosure.

[0024] FIG. 6 is a series of histograms and plots derived from fluorescence activated cell sorting (FACS) analysis of HLA-A*02 expressing Jurkat cells transfected with shRNA of the disclosure that target coding sequence (CDS) region of the HLA-A*02 mRNA. The shRNA knockdown efficiency of HLA-A*02 expression was measured by staining Jurkat cells with fluorescently labeled anti-HLA-A*02 antibody (HLA-A*02), following transfection with shRNA.

[0025] FIG. 7 is a series of histograms and plots derived from fluorescence activated cell sorting (FACS) analysis of Jurkat cells co-transfected with HLA-A*02 and shRNA of the disclosure that target the 5′ and 3′ untranslated regions of HLA-A*02 mRNA. The shRNA-mediated reduction of HLA-A, HLA-B, and HLA-C(HLA Class I) expression was measured by staining Jurkat cells with fluorescently labeled anti-HLA-A/B/C antibody.

[0026] FIG. 8 is a series of plots and histograms showing Jurkat cell activation and the binding capacity of the HLA-A*02 blocker module to its ligand, pMHC tetramer, in the presence (right) and absence (left) of HLA-A targeting shRNA.

### DETAILED DESCRIPTION

[0027] The inventors have developed a solution to the problems of identifying suitable therapeutic targets and achieving cell selectivity in the treatment of diseases, particularly cancers, with adoptive cellular therapy. The primary object of the invention is an immune cell used in adoptive cell therapy that has reduced autocrine signaling. The immune cell can target cells, for example, based on loss of heterozygosity (FIG. 1). The immune cells use a two receptor system, in which activator and inhibitory signals are integrated at the cellular level within the immune cells (FIGS. 2A, 2B, 3A and 3B), by which selective targeting of tumor but not non-tumor cells is achieved. Differences in expression of surface proteins that are absent or lost in target cells but present in normal cells are thereby converted to a targeted anti-tumor cell therapy. These differences improve targeting by cell therapies, and protect normal cells from the cytotoxic effects of effector cells used for adoptive cell therapies. The two receptor system described herein can be expressed in autologous immune cells specifically engineered to decrease complications such as inhibitory signals between the immune cells used in the adoptive therapy. The inhibitory signals described herein, in some embodiments, are mediated by an inhibitory receptor, expressed by immune cells described herein, comprising a ligand binding domain specific to a class I major histocompatibility complex (MHC-I) molecule, or a peptide-MHC complex thereof. However, native expression of an MHC-I molecule by the immune cells can potentially bind to and activate or inactivate the inhibitory receptor. Such binding and activation/inactivation can occur through both inter- and intra-cellular interactions. Inter-cellular binding and activation/inactivation occurs when a natively expressed MHC-I molecule on immune cells binds an inhibitory receptor on a separate engineered immune cell expressing an inhibitory receptor. Intra-cellar inhibitory receptor binding can occur when, for example, the inhibitory receptor binds to an MHC-I molecule natively expressed on the same immune cell (FIGS. 4A and 4B). As described herein, both the inter- and intra-cellular binding/signaling of the inhibitory receptor on or among engineered immune cells are referred to as autocrine signaling or binding. Both intra- and inter-cellular inactivation can result in undesired inhibition at, for example, the site of a target activator or in a preparation or composition comprising a plurality of immune cells expressing the inhibitory receptor. The inventors of the present disclosure have recognized that the undesired autocrine binding/signaling can be suppressed if the immune cell has reduced or eliminated human leukocyte antigen (HLA) expression or function. HLA expression or function can be reduced or eliminated by targeting an HLA-A gene or allele thereof, e.g. HLA-A*02, with an interfering RNA molecule. (FIG. 4B). In some embodiments, the immune cell comprises an interfering RNA, e.g. an shRNA complementary to a portion of the HLA-A messenger RNA (mRNA) transcript. HLA-A is a component of MHC class I complex. In the MHC class I complex, B2M binds the α chain to form a complex on the cell surface. Viewed across the cell membrane with the cytoplasm down, the α1 domain is directly above B2M, and α1 and B2M lie adjacent to α2 and α3, the latter of which is linked to a transmembrane domain. Without wishing to be bound by theory, it is thought that reduced or eliminated expression or function of HLA-A interferes with the formation of the MHC class I complex, leading to immune cells with greatly reduced or absent MHC class I on the cell surface.

[0028] The immune cell described herein comprises an inhibitory receptor comprising a binding domain specific to a class I major histocompatibility complex (MHC-I) molecule, or a peptide-MHC complex thereof, wherein expression and/or function of human leukocyte antigen (HLA) in said immune cell has been reduced or eliminated. In particular embodiments, the immune cells comprise an interfering RNA, comprising a sequence complementary to a sequence of a HLA-A*02 mRNA. In some embodiments, the interfering RNA is capable of inducing RNA interference (RNAi) mediated degradation of the HLA-A*02 mRNA. The immune cells described herein, according to some embodiments, comprise a short hairpin RNA. In some embodiments, the shRNA comprises a first sequence and a second sequence, wherein the first sequence, has from 5′ to 3′ a sequence complementary to the HLA-A*02 mRNA; and wherein the second sequence, has from 5′ to 3′ end a sequence complementary to the first sequence, wherein the first sequence and second sequence form the shRNA. In an immune cell comprising the shRNA, the HLA-A gene product is reduced or eliminated in expression and/or function. In some embodiments, an immune cell comprising the shRNA has reduced or eliminated expression or function of an MHC-I molecule.

[0029] In one aspect, the disclosure provides vectors for expressing the shRNA described herein in an immune cell. In another aspect, the disclosure provides methods of manufacturing the immune cells described herein.

[0030] In one aspect, disclosure provides compositions comprising the immune cells described herein.

[0031] In one aspect, the disclosure provides methods of treatment comprising administering the immune cells described herein to a subject in need thereof. In another aspect, the disclosure provides compositions comprising the immune cells described herein for use as a medicament in the treatment of a subject in need. In some embodiments, the subject suffers from or is at risk of cancer or a hematological malignancy.

[0032] The approach disclosed herein uses, in some embodiments, two engineered receptors, the first comprising a ligand binding domain for an activator ligand and the second comprising a ligand binding domain for an inhibitor ligand, which is selectively activated in target cells using an “AND NOT” Boolean logic (FIGS. 2A, 2B, 3A and 3B). Normal cells express both the activator and the inhibitor ligands, but activation of effector cells through the first receptor is blocked by binding of the second receptor comprising the inhibitor LBD to the inhibitor ligand, which exerts a protective effect and dominates the activity of the first, activator receptor. In contrast, in target cells that express the activator ligand but do not express the inhibitor ligand, binding of the activator ligand by the activator LBD leads to activation of the cell. Advantages of the dual activator/inhibitor receptor strategy of the instant disclosure include the ability to tune the activator and inhibitor combination to create a potent, but specific tumor-targeted adoptive cell therapy. Further, this approach can overcome the challenges of a variable effector to target cell ratio (E:T ratio) in the body, and the potentially massive excess of normal versus tumor cells seen when targeting tumor cells with adoptive cell therapies (e.g., 10¹³ normal cells versus 10⁹ tumor cells). Still further, the inventors have identified activators and inhibitors that cover large potential patient combinations, rendering this a commercially feasible approach.

[0033] Specificity of the adoptive cell therapy for a specific cell type can be achieved through the different activities of the first and second receptors, and the differential expression of the first and second ligands for the first and second receptors, respectively. Binding of the first ligand to the first receptor provides an activation signal, while binding of the second ligand to the second receptor prevents or reduces activation of effector cells even in the presence of the first ligand. The first ligand can be expressed more broadly than the second ligand, for example in both cells targeted by an adoptive cell therapy, and in healthy cells that are not target cells for an adoptive cell therapy (non-target cells). In contrast, the second ligand is expressed in the non-target cells, and is not expressed in the target cells. Only the target cells and not the non-target express the first and not the second ligand, thereby activating effector cells comprising the dual receptors of the disclosure in the presence of these cells.

[0034] The disclosure provides compositions and methods for targeting cells (e.g. tumor cells) based on loss of heterozygosity through use of two engineered receptors. The two engineered receptors, one an inhibitor and one activator, each comprise a different ligand binding domain that recognizes a different ligand. Differences in expression of the activator and inhibitory ligands are used to selectively activate effector cells expressing the two receptors when only the first, activator ligand is present. In some embodiments, one of the receptors activates the cell and other receptor inhibits the cell when each binds its cognate ligand. In some embodiments, the receptor comprising the second, inhibitor ligand binding domain dominates signaling so that if a target cell expresses both targets, the result is inhibition of the effector cell. Only when the inhibitory target is absent from the cell, does the first, activator ligand induce activation of the effector cell through the receptor comprising the first, activator ligand binding domain.

[0035] Any widely expressed cell surface molecule, for example a cell adhesion molecule, a cell-cell signaling molecule, an extracellular domain, a molecule involved in chemotaxis, a glycoprotein, a G protein-coupled receptor, a transmembrane, a receptor for a neurotransmitter or a voltage gated ion channel, or a peptide antigen of any of these, can be used as a first, activator ligand. As a further example, the activator ligand can be the transferrin receptor (TFRC). Any cell surface molecule not expressed on the surface of the target cell can be used as a second ligand. In those embodiments where an engineered receptor is used in the adoptive cell therapy to treat cancer, and the target cells are cancer cells, a second, inhibitory ligand may be chosen based on the loss of heterozygosity of the second ligand in cancer cells. Exemplary genes whose expression is frequently lost in cancer cells, for example due to mutations leading to loss of heterozygosity, include HLA class I alleles, minor histocompatibility antigens (MiHAs), and Y chromosome genes. In some embodiments, the HLA class I allele comprises HLA-A*02.

[0036] The disclosure further provides vectors and polynucleotides encoding the engineered receptors described herein.

[0037] The disclosure further provides methods of making immune cell populations comprising the engineered receptors described herein, and methods of treating disorders using the same.

### Definitions

[0038] Prior to setting forth this disclosure in more detail, it may be helpful to an understanding thereof to provide definitions of certain terms to be used herein.

[0039] Unless defined otherwise, all technical and scientific terms used herein have the same meaning as commonly understood by those of ordinary skill in the art to which the invention belongs. Although any methods and materials similar or equivalent to those described herein can be used in the practice or testing of particular embodiments, preferred embodiments of compositions, methods and materials are described herein. For the purposes of the present disclosure, the following terms are defined below. Additional definitions are set forth throughout this disclosure.

[0040] The articles “a,” “an,” and “the” are used herein to refer to one or to more than one (i.e., to at least one, or to one or more) of the grammatical object of the article. By way of example, “an element” means one element or one or more elements.

[0041] The use of the alternative (e.g., “or”) should be understood to mean either one, both, or any combination thereof of the alternatives.

[0042] The term “and/or” should be understood to mean either one, or both of the alternatives.

[0043] Throughout this specification, unless the context requires otherwise, the words “comprise”, “comprises” and “comprising” will be understood to imply the inclusion of a stated step or element or group of steps or elements but not the exclusion of any other step or element or group of steps or elements. By “consisting of” is meant including, and limited to, whatever follows the phrase “consisting of.” Thus, the phrase “consisting of” indicates that the listed elements are required or mandatory, and that no other elements may be present. By “consisting essentially of” is meant including any elements listed after the phrase, and limited to other elements that do not interfere with or contribute to the activity or action specified in the disclosure for the listed elements. Thus, the phrase “consisting essentially of” indicates that the listed elements are required or mandatory, but that no other elements are present that materially affect the activity or action of the listed elements.

[0044] Reference throughout this specification to “one embodiment,” “an embodiment,” “a particular embodiment,” “a related embodiment,” “a certain embodiment,” “an additional embodiment,” “some embodiments,” or “a further embodiment” or combinations thereof means that a particular feature, structure or characteristic described in connection with the embodiment is included in at least one embodiment. Thus, the appearances of the foregoing phrases in various places throughout this specification are not necessarily all referring to the same embodiment. Furthermore, the particular features, structures, or characteristics may be combined in any suitable manner in one or more embodiments. It is also understood that the positive recitation of a feature in one embodiment, serves as a basis for excluding the feature in a particular embodiment.

[0045] As used herein, the term “about” or “approximately” refers to a quantity, level, value, number, frequency, percentage, dimension, size, amount, weight or length that varies by as much as 15%, 10%, 9%, 8%, 7%, 6%, 5%, 4%, 3%, 2% or 1% to a reference quantity, level, value, number, frequency, percentage, dimension, size, amount, weight or length. In one embodiment, the term “about” or “approximately” refers a range of quantity, level, value, number, frequency, percentage, dimension, size, amount, weight or length±15%, ±10%, ±9%, ±8%, ±7%, ±6%, ±5%, ±4%, ±3%, ±2%, or ±1% about a reference quantity, level, value, number, frequency, percentage, dimension, size, amount, weight or length.

[0046] As used herein, the term “isolated” means material that is substantially or essentially free from components that normally accompany it in its native state. In particular embodiments, the term “obtained” or “derived” is used synonymously with isolated.

[0047] The terms “subject,” “patient” and “individual” are used interchangeably herein to refer to a vertebrate, preferably a mammal, more preferably a human. Tissues, cells, and their progeny of a biological entity obtained in vivo or cultured in vitro are also encompassed. A “subject,” “patient” or “individual” as used herein, includes any animal that exhibits pain that can be treated with the vectors, compositions, and methods contemplated herein. Suitable subjects (e.g., patients) include laboratory animals (such as mouse, rat, rabbit, or guinea pig), farm animals, and domestic animals or pets (such as a cat or dog). Non-human primates and, preferably, human patients, are included.

[0048] As used herein “treatment” or “treating,” includes any beneficial or desirable effect, and may include even minimal improvement in symptoms. “Treatment” does not necessarily indicate complete eradication or cure of the disease or condition, or associated symptoms thereof.

[0049] As used herein, “prevent,” and similar words such as “prevented,” “preventing” etc., indicate an approach for preventing, inhibiting, or reducing the likelihood of a symptom of disease. It also refers to delaying the onset or recurrence of a disease or condition or delaying the occurrence or recurrence of the symptoms of a disease. As used herein, “prevention” and similar words also includes reducing the intensity, effect, symptoms and/or burden of disease prior to onset or recurrence.

[0050] As used herein, the term “amount” refers to “an amount effective” or “an effective amount” of a virus to achieve a beneficial or desired prophylactic or therapeutic result, including clinical results.

[0051] A “prophylactically effective amount” refers to an amount of a virus effective to achieve the desired prophylactic result. Typically but not necessarily, since a prophylactic dose is used in subjects prior to or at an earlier stage of disease, the prophylactically effective amount is less than the therapeutically effective amount.

[0052] A “therapeutically effective amount” of a virus or cell may vary according to factors such as the disease state, age, sex, and weight of the individual, and the ability of the virus or cell to elicit a desired response in the individual. A therapeutically effective amount is also one in which any toxic or detrimental effects of the virus or cell are outweighed by the therapeutically beneficial effects. The term “therapeutically effective amount” includes an amount that is effective to “treat” a subject (e.g., a patient).

[0053] An “increased” or “enhanced” amount of a physiological response, e.g., electrophysiological activity or cellular activity, is typically a “statistically significant” amount, and may include an increase that is 1.1, 1.2, 1.5, 2, 3, 4, 5, 6, 7, 8, 9, 10, 15, 20, 30 or more times (e.g., 500, 1000 times) (including all integers and decimal points in between and above 1, e.g., 1.5, 1.6, 1.7. 1.8, etc.) the level of activity in an untreated cell.

[0054] A “decrease” or “reduced” amount of a physiological response, e.g., electrophysiological activity or cellular activity, is typically a “statistically significant” amount, and may include an decrease that is 1.1, 1.2, 1.5, 2, 3, 4, 5, 6, 7, 8, 9, 10, 15, 20, 30 or more times (e.g., 500, 1000 times) (including all integers and decimal points in between and above 1, e.g., 1.5, 1.6, 1.7. 1.8, etc.) the level of activity in an untreated cell.

[0055] By “maintain,” or “preserve,” or “maintenance,” or “no change,” or “no substantial change,” or “no substantial decrease” refers generally to a physiological response that is comparable to a response caused by either vehicle, or a control molecule/composition. A comparable response is one that is not significantly different or measurable different from the reference response.

[0056] In general, “sequence identity” or “sequence homology” refers to an exact nucleotide-to-nucleotide or amino acid-to-amino acid correspondence of two polynucleotides or polypeptide sequences, respectively. Typically, techniques for determining sequence identity include determining the nucleotide sequence of a polynucleotide and/or determining the amino acid sequence encoded thereby, and comparing these sequences to a second nucleotide or amino acid sequence. Two or more sequences (polynucleotide or amino acid) can be compared by determining their “percent identity.” The percent identity of two sequences, whether nucleic acid or amino acid sequences, is the number of exact matches between two aligned sequences divided by the length of the shorter sequences and multiplied by 100. Percent identity may also be determined, for example, by comparing sequence information using the advanced BLAST computer program, including version 2.2.9, available from the National Institutes of Health. The BLAST program is based on the alignment method of Karlin and Altschul, Proc. Natl. Acad. Sci. USA 87:2264-2268 (1990) and as discussed in Altschul, et al., J. Mol. Biol. 215:403-410 (1990); Karlin And Altschul, Proc. Natl. Acad. Sci. USA 90:5873-5877 (1993); and Altschul et al., Nucleic Acids Res. 25:3389-3402 (1997). Briefly, the BLAST program defines identity as the number of identical aligned symbols (generally nucleotides or amino acids), divided by the total number of symbols in the shorter of the two sequences. The program may be used to determine percent identity over the entire length of the proteins being compared. Default parameters are provided to optimize searches with short query sequences in, for example, with the blastp program. The program also allows use of an SEG filter to mask-off segments of the query sequences as determined by the SEG program of Wootton and Federhen, Computers and Chemistry 17:149-163 (1993). Ranges of desired degrees of sequence identity are approximately 80% to 100% and integer values therebetween. Typically, the percent identities between a disclosed sequence and a claimed sequence are at least 80%, at least 85%, at least 90%, at least 95%, or at least 98%.

[0057] The term “exogenous” is used herein to refer to any molecule, including nucleic acids, protein or peptides, small molecular compounds, and the like that originate from outside the organism. In contrast, the term “endogenous” refers to any molecule that originates from inside the organism (i.e., naturally produced by the organism).

[0058] The term “MOI” is used herein to refer to multiplicity of infection, which is the ratio of agents (e.g. viral particles) to infection targets (e.g. cells). All publications and patents mentioned herein are hereby incorporated by reference in their entirety as if each individual publication or patent was specifically and individually indicated to be incorporated by reference. In case of conflict, the present application, including any definitions herein, will control. However, mention of any reference, article, publication, patent, patent publication, and patent application cited herein is not, and should not be taken as an acknowledgment, or any form of suggestion, that they constitute valid prior art or form part of the common general knowledge in any country in the world.

[0059] In the present description, any concentration range, percentage range, ratio range, or integer range is to be understood to include the value of any integer within the recited range and, when appropriate, fractions thereof (such as one tenth and one hundredth of an integer), unless otherwise indicated. The term “about”, when immediately preceding a number or numeral, means that the number or numeral ranges plus or minus 10%.

[0060] As used herein, a “target cell” refers to cell that is targeted by an adoptive cell therapy. For example, a target cell can be cancer cell, which can be killed by the transplanted T cells of the adoptive cell therapy. Target cells of the disclosure express an activator ligand as described herein, and do not express an inhibitor ligand.

[0061] The present description includes artificial receptors with activating and inhibiting activity. The artificial receptors are sometimes referred to as “activator receptors,” “inhibitor receptors,” or “engineered receptors.” Inhibitor receptors are sometimes referred to as “blockers,” “blocking receptors,” and the like.

[0062] “RNAi” or “RNA interference” refers to the process of sequence-specific post-transcriptional gene silencing, mediated by double-stranded RNA (dsRNA). Duplex RNAs such as siRNA (small interfering RNA), miRNA (micro RNA), shRNA (short hairpin RNA), ddRNA (DNA-directed RNA), piRNA (Piwi-interacting RNA), or rasiRNA (repeat associated siRNA) and modified forms thereof are all capable of mediating RNA interference. These dsRNA molecules may be commercially available or may be designed and prepared based on known sequence information. The anti-sense strand of these molecules can include RNA, DNA, PNA, or a combination thereof. DNA/RNA chimeric polynucleotides include, but are not limited to, a double-strand polynucleotide composed of DNA and RNA that inhibits the expression of a target gene. dsRNA molecules can also include one or more modified nucleotides, as described herein, which can be incorporated on either or both strands.

[0063] In RNAi gene silencing or knockdown, dsRNA comprising a first (anti-sense) strand that is complementary to a portion of a target gene and a second (sense) strand that is fully or partially complementary to the first anti-sense strand is introduced into an organism. After introduction into the organism, the target gene-specific dsRNA is processed into relatively small fragments (siRNAs) and can subsequently become distributed throughout the organism, decrease messenger RNA of target gene, leading to a phenotype that may come to closely resemble the phenotype arising from a complete or partial deletion of the target gene.

[0064] Certain dsRNAs in cells can undergo the action of Dicer enzyme, a ribonuclease III enzyme. Dicer can process the dsRNA into shorter pieces of dsRNA, i.e. siRNAs. RNAi also involves an endonuclease complex known as the RNA induced silencing complex (RISC). Following cleavage by Dicer, siRNAs enter the RISC complex and direct cleavage of a single stranded RNA target having a sequence complementary to the anti-sense strand of the siRNA duplex. The other strand of the siRNA is the passenger strand. Cleavage of the target RNA takes place in the middle of the region complementary to the anti-sense strand of the siRNA duplex. siRNAs can thus down regulate or knock down gene expression by mediating RNA interference in a sequence-specific manner.

[0065] As used herein, “target gene” or “target sequence” refers to a gene or gene sequence whose corresponding RNA is targeted for degradation through the RNAi pathway using dsRNAs or siRNAs as described herein. To target a gene, for example using an siRNA, the siRNA comprises an anti-sense region complementary to, or substantially complementary to, at least a portion of the target gene or sequence, and sense strand complementary to the anti-sense strand. Once introduced into a cell, the siRNA directs the RISC complex to cleave an RNA comprising a target sequence, thereby degrading the RNA.

### Gene Targets

[0066] In some embodiments, the immune cells have reduced or eliminated expression or function of a target gene. Exemplary target genes are described below.

### MHC Class I Genes and Polypeptides

[0067] The major histocompatibility complex (MHC) is a locus in the vertebrate genome that encodes a set of polypeptides required for the adaptive immune system. Among these are MHC class I polypeptides that include HLA-A, HLA-B, and HLA-C and alleles thereof. MHC class I alleles are highly polymorphic and expressed in all nucleated cells. MHC class I polypeptides encoded by HLA-A, HLA-B, and HLA-C and alleles thereof form heterodimers with β2 microglobulin (B2M) and present in complex with antigens on the surface of cells. In some embodiments, the immune cells of the disclosure are inactivated by an inhibitor ligand comprising an MHC class I polypeptide, e.g. HLA-A, HLA-B, and HLA-C and alleles thereof. HLA-A alleles can be, for example and without limitation, HLA-A*02, HLA-A*02:01, HLA-A*02:01:01, HLA-A*02:01:01:01, and/or any gene that encodes protein identical or similar to HLA-A*02 protein. Thus, to prevent autocrine signaling/binding as described herein, it is desirable to eliminate or reduce expression of polypeptides encoded by HLA-A, HLA-B, and HLA-C and alleles thereof in the immune cells.

[0068] In some embodiments, the immune cells described herein are modified to inactivate, or reduce or eliminate expression or function of an endogenous gene encoding an allele of an endogenous MHC class I polypeptide. In some embodiments, the gene encoding the MHC class I polypeptide is HLA-A, HLA-B, and/or HLA-C. HLA-A, HLA-B and HLA-C are encoded by the HLA-A, HLA-B and HLA-C loci. Each of HLA-A, HLA-B and HLA-C includes many variant alleles, all of which are envisaged as within the scope of the instant disclosure. In some embodiments, the gene encoding the MHC class I polypeptide is HLA-A. In some embodiments, the gene encoding the MHC class I polypeptide is HLA-A*02. In some embodiments, the gene encoding the MHC class I polypeptide is HLA-A*02:01. In some embodiments, the gene encoding the MHC class I polypeptide is HLA-A*02:01:01. In some embodiments, the gene encoding the MHC class I polypeptide is HLA-A*02:01:01:01.

### Target Gene Sequences

[0069] The disclosure provides an immune cell comprising an inhibitory receptor comprising a ligand binding domain specific to a class I major histocompatibility complex (MHC-I) molecule, or a peptide-MHC complex thereof, wherein expression and/or function of human leukocyte antigen (HLA) in said immune cell has been reduced or eliminated. In some embodiments, the immune cell comprises an interfering RNA, comprising a sequence complementary an RNA sequence transcribed from the HLA gene.

[0070] In some embodiments, the target gene is an allele of an endogenous MHC class I polypeptide specifically bound by the inhibitory receptor. In some embodiments, the gene encoding the MHC class I polypeptide is HLA-A, HLA-B, HLA-C, or a combination thereof. In some embodiments, the gene encoding the MHC class I polypeptide is HLA-A. HLA-A is a polymorphic gene whose various alleles may also be target genes for modification. The alleles may also be referred to as genes, and can include, for example, the HLA-A*02, HLA-A*02:01, HLA-A*02:01:01, and/or the HLA-A*02:01:01:01 alleles. In some embodiments, the gene encoding the MHC class I polypeptide is HLA-A*02. In some embodiments, the gene encoding the MHC class I polypeptide is HLA-A*02:01. In some embodiments, the gene encoding the MHC class I polypeptide is HLA-A*02:01:01. In some embodiments, the gene encoding the MHC class I polypeptide is HLA-A*02:01:01:01.

[0071] Interfering RNAs of the disclosure target and bind to a target sequence through base pair complementarity. The interfering RNA has a complementary sequence to any region of a target gene sequence that is transcribed into RNA. In some embodiments, the target gene is HLA. Transcribed RNA can include intronic regions (introns), expressed regions (exons), untranslated regions (UTRs), coding sequences (CDS), or any other region of the target gene that undergoes transcription. Transcribed RNA can include primary transcripts, pre-mRNA, mature mRNA, and/or mRNA splice variants. RNA can include regulatory signals, such as polyA sites or polyA signal sequences. Transcribed RNA can include any non-coding region of the target gene that is not transcribed as part of an mRNA transcript, e.g. long noncoding RNA (lnRNA) or micro RNA (miRNA). Any transcribed region of the target gene may be targeted for the purpose of reducing or eliminating expression of the target gene in the immune cells described herein. Delivery of interfering RNA can be accomplished using any method known in the art to target gene transcripts that results in altered, disrupted, reduced, or eliminated expression or function the target gene or gene product.

[0072] In some embodiments, the target gene is an HLA gene. In some embodiments, the HLA gene is the HLA-A gene. When used herein as a reference to a target gene or an associated transcript (e.g., mRNA), the HLA may refer to HLA-A, the HLA-A*02 allele, the HLA-A*02:01 allele, the HLA-A*02:01:01 allele, and/or the HLA-A*02:01:01:01 allele. In some embodiments, the HLA gene is the HLA-A*02 allele. In some embodiments, the HLA gene is the HLA-A*02:01 allele. In some embodiments, the HLA gene is the HLA-A*02:01:01 allele. In some embodiments, the HLA gene is the HLA-A*02:01:01:01 allele. In some embodiments, the interfering RNA is complementary to at least a portion of an mRNA transcribed from an HLA gene. In some embodiments, the mRNA is transcribed from an HLA-A*02 allele. In some embodiments, the mRNA is transcribed from an HLA-A*02:01 allele. In some embodiments, the mRNA is transcribed from an HLA-A*02:01:01 allele. In some embodiments, the mRNA is transcribed from an HLA-A*02:01:01:01 allele. In some embodiments, the mRNA comprises a coding sequence. In some embodiments, the mRNA sequence comprises an untranslated region.

[0073] Gene sequences for the target genes described herein are known in the art. The sequences can be found at public databases, such as NCBI GenBank or the NCBI nucleotide database. Sequences may be found using gene identifiers, for example, the HLA-A gene has NCBI Gene ID: 3105, the HLA-B gene has NCBI Gene ID: 3106, and the HLA-C gene has NCBI Gene ID: 3107. Gene sequences may also be found by searching public databases using keywords. For example, HLA-A alleles may be found in the NCBI nucleotide database by searching keywords, “HLA-A*02”, “HLA-A*02:01”, “HLA-A*02:01:01”, or “HLA-A*02:01:01:01.” These sequences can be used for targeting in various gene editing techniques known in the art. Table 1 provides non-limiting illustrative sequences for the target HLA-A allele gene sequences targeted for modification as described herein.

TABLE 1
Illustrative Target HLA-A Allele Gene Sequences

| Gene | SEQ ID NO | Identifier |
|---|---|---|
| HLA-A*02 | 8795 | GenBank: LK021978.1 |
| HLA-A*02:01 | 8796 | GenBank: MK953623.1 |
| HLA-A*02:01:01 | 8797 | GenBank: LT963297.1 |
| HLA-A*02:01:01:01 | 8798 | GenBank: HG794376.1 |
| HLA-A*02:01:01:01 mRNA | 8799 | |

### Illustrative Interfering RNAs

[0074] The disclosure provides interfering RNAs. The double stranded RNA molecule of the invention may be in the form of any type of RNA interference molecule known in the art. In some embodiments, the double stranded RNA molecule is a small interfering RNA (siRNA). In other embodiments, the double stranded RNA molecule is a short hairpin RNA (shRNA) molecule. In other embodiments, the double stranded RNA molecule is a Dicer substrate that is processed in a cell to produce an siRNA. In other embodiments the double stranded RNA molecule is part of a microRNA precursor molecule.

[0075] In some embodiments, the shRNA is a length to be suitable as a Dicer substrate, which can be processed to produce a RISC active siRNA molecule. See, e.g., Rossi et al., US2005/0244858.

[0076] A Dicer substrate double stranded RNA (e.g. a shRNA) can be of a length sufficient that it is processed by Dicer to produce an active siRNA, and may further include one or more of the following properties: (i) the Dicer substrate shRNA can be asymmetric, for example, having a 3′ overhang on the anti-sense strand, (ii) the Dicer substrate shRNA can have a modified 3′ end on the sense strand to direct orientation of Dicer binding and processing of the dsRNA to an active siRNA, for example the incorporation of one or more DNA nucleotides, and (iii) the first and second strands of the Dicer substrate ds RNA can from 21-30 bp in length.

[0077] In some embodiments, the interfering RNAs comprise a sequence complementary to a sequence of a HLA-A*02 mRNA. In some embodiments, the interfering RNA is capable of inducing RNAi-mediated degradation of the HLA-A*02 mRNA. In some embodiments, the HLA-A*02 mRNA sequence comprises a coding sequence. In some embodiments, the HLA-A*02 mRNA sequence comprises an untranslated region.

[0078] In some embodiments, the interfering RNA is a short hairpin RNA (shRNA). In some embodiments, the shRNA comprises a first sequence, having from 5′ to 3′ end a sequence complementary to the HLA-A*02 mRNA; and a second sequence, having from 5′ to 3′ end a sequence complementary to the first sequence, wherein the first sequence and second sequence form the shRNA.

[0079] In some embodiments, the first sequence is 18, 19, 20, 21, or 22 nucleotides. In some embodiments, the first sequence is complementary to a sequence selected from SEQ ID NOs: 400-8794. In some embodiments, the first sequence has GC content greater than or equal to 25% and less than 60%. In some embodiments, the first sequence is complementary to a sequence selected from SEQ ID NOs: 400-3990. In some embodiments, the first sequence does not comprise four nucleotides of the same base or a run of seven C or G nucleotide bases. In some embodiments, the first sequence is complementary to a sequence selected from SEQ ID NOs: 400-3508. In some embodiments, the first sequence is complementary to a sequence selected from SEQ ID NOs: 400-678. In some embodiments, the first sequence is complementary to a sequence selected from SEQ ID NOs: 400-485. Illustrative target HLA sequences complementary to the first sequence are shown in Table 2.

TABLE 2
Illustrative target HLA sequences
complementary to first sequence

| SEQ ID | |
|---|---|
| NO | Sequence |
| 400 | CTTCTTCCTTCCCTATTAAAA |
| 401 | TCTCACTCCATGAGGTATTTC |
| 402 | CTCTCACTCCATGAGGTATTT |
| 403 | GAGGAGGAAGAGCTCAGATAG |
| 404 | GCTCTCACTCCATGAGGTATT |
| 405 | AGGATTACATCGCCCTGAAAG |
| 406 | ACACCGTCCAGAGGATGTATG |
| 407 | AGGGTCCTTCTTCCTGGATAC |
| 408 | CCTACGACGGCAAGGATTACA |
| 409 | TCACTCCATGAGGTATTTCTT |
| 410 | CTACGACGGCAAGGATTACAT |
| 411 | CTCACTCCATGAGGTATTTCT |
| 412 | GGAGGAAGAGCTCAGATAGAA |
| 413 | CACACCGTCCAGAGGATGTAT |
| 414 | CACGCTGTCTCTGACCATGAA |
| 415 | CTGGACAGGAGCAGAGATACA |
| 416 | TGGAGGAGGAAGAGCTCAGAT |
| 417 | GGCTCTCACTCCATGAGGTAT |
| 418 | CATCTCTGTCTCAACTTCATG |
| 419 | TACGACGGCAAGGATTACATC |
| 420 | GGATTACATCGCCCTGAAAGA |
| 421 | GATTACATCGCCCTGAAAGAG |
| 422 | CTCAGACCACCAAGCACAAGT |
| 423 | TCACACCGTCCAGAGGATGTA |
| 424 | ACTCCATGAGGTATTTCTTCA |
| 425 | CACTCCATGAGGTATTTCTTC |
| 426 | CCATGAGGTATTTCTTCACAT |
| 427 | ACTTCTTCCTTCCCTATTAAA |
| 428 | GTGTCTCTCACAGCTTGTAAA |
| 429 | CTGTGTTCGTGTAGGCATAAT |
| 430 | TGTGTTCGTGTAGGCATAATG |
| 431 | TAACTTCTTCCTTCCCTATTA |
| 432 | TCTGGACAGGAGCAGAGATAC |
| 433 | TTGCTGGCCTGGTTCTCTTTG |
| 434 | TGTCTCTCACAGCTTGTAAAG |
| 435 | ACTTGAAGAACCCTGACTTTG |
| 436 | GAAGAACCCTGACTTTGTTTC |
| 437 | TCTGTGTTCGTGTAGGCATAA |
| 438 | CATGGTGCACTGAGCTGTAAC |
| 439 | GTAACTTCTTCCTTCCCTATT |
| 440 | CATGTGCAGCATGAGGGTTTG |
| 441 | TTGTTCCTGCCCTTCCCTTTG |
| 442 | ACCCAGTTCTCACTCCCATTG |
| 443 | GGGTTTCCAGAGAAGCCAATC |
| 444 | TTCTCCCTCTCCCAACCTATG |
| 445 | GTCTCTCACAGCTTGTAAAGT |
| 446 | TGTGTCTCTCACAGCTTGTAA |
| 447 | GAGGAAGAGCTCAGATAGAAA |
| 448 | TGAAGAACCCTGACTTTGTTT |
| 449 | TTGAAGAACCCTGACTTTGTT |
| 450 | GTGTTCGTGTAGGCATAATGT |
| 451 | TGGTGCACTGAGCTGTAACTT |
| 452 | CTCCCTCTCCCAACCTATGTA |
| 453 | AGGAGGAAGAGCTCAGATAGA |
| 454 | ACCTATGTAGGGTCCTTCTTC |
| 455 | GGGTCCTTCTTCCTGGATACT |
| 456 | GGTCCTTCTTCCTGGATACTC |
| 457 | GTCCTTCTTCCTGGATACTCA |
| 458 | AAGCCAATCAGTGTCGTCGCG |
| 459 | AAGAGGACCTGCGCTCTTGGA |
| 460 | AAGTGTGAGACAGCTGCCTTG |
| 461 | AAGGCACCTGCATGTGTCTGT |
| 462 | AATCATCTTTCCTGTTCCAGA |
| 463 | AAAGGCACCTGCATGTGTCTG |
| 464 | AAAGAGGACCTGCGCTCTTGG |
| 465 | AAACGCATATGACTCACCACG |
| 466 | GGAAGAGCTCAGATAGAAA |
| 467 | GGGAGACACGGAAAGTGAA |
| 468 | CACCTGCCATGTGCAGCATGA |
| 469 | GGAGATCACACTGACCTGGCA |
| 470 | GGATTACATCGCCCTGAAAG |
| 471 | GCAGGAGGGTCCGGAGTATT |
| 472 | GGACGGGGAGACACGGAAAG |
| 473 | GAAAGTGAAGGCCCACTCA |
| 474 | GATACCTGGAGAACGGGAAG |
| 475 | GCTGTGGTGGTGCCTTCTGG |
| 476 | GCTACTACAACCAGAGCGAG |
| 477 | GTGGCTCCGCAGATACCTG |
| 478 | GCCAATCAGTGTCGTCGCG |
| 479 | GAGGACCTGCGCTCTTGGA |
| 480 | GTGTGAGACAGCTGCCTTG |
| 481 | GGCACCTGCATGTGTCTGT |
| 482 | TCATCTTTCCTGTTCCAGA |
| 483 | AGGCACCTGCATGTGTCTG |
| 484 | AGAGGACCTGCGCTCTTGG |
| 485 | ACGCATATGACTCACCACG |

[0080] In some cases, the first sequence may have 100% identity, i.e. complete identity, homology, complementarity to the target nucleic acid sequence. In other cases, there may be one or more mismatches between the first sequence and the target nucleic acid sequence. For example, there may be 1, 2, 3, 4, 5, 6, or 7 mismatches between the sense region and the target nucleic acid sequence.

[0081] The sequences set forth in Table 2 are presented as DNA sequences. In all sequences set forth in Table 2, thymine (T) may be replaced by uracil (U) to arrive at the sequence of the target mRNA sequence. Illustrative RNA sequences corresponding to the sequences set forth in Table 2 are provided as SEQ ID NOS: 8831-8916.

[0082] In some embodiments, the first and second sequence are present on a single stranded polynucleotide, wherein the first sequence and second sequence are separated by 4, 5, 6, 7, 8, 9, 10, 11, 12, 13, 14, or 15 nucleotides, wherein the 4, 5, 6, 7, 8, 9, 10, 11, 12, 13, 14, or 15 nucleotides form a loop region in the shRNA. In some embodiments, the loop region comprises a sequence selected from SEQ ID NOs: 8800-8813. Illustrative loop region sequences are shown in Table 3.

TABLE 3
Illustrative loop region sequences

| SEQ ID NO | Loop Region Sequence |
|---|---|
| 8800 | CGAA |
| 8801 | UUCAAGA |
| 8802 | AUAUUCA |
| 8803 | UGUGCUGUC |
| 8804 | CUCGAG |
| 8805 | CUUCCUGUCAGA |
| 8806 | CUUCCCUUUGUCAGA |
| 8807 | GUGUUAUUCUUG |
| 8808 | GUGUCUUAAUUG |
| 8809 | GUGUUAGUCUUG |
| 8810 | UCAAGAG |
| 8811 | GGACAUCCAGGG |
| 8812 | GUGAAGCCACAGAUG |
| 8813 | GAUUCUAAAA |

[0083] In some embodiments, the first sequence and second sequence comprise a linker, sometimes referred to as a loop. In some embodiments, both the first sequence and the second sequence are encoded by one single-stranded RNA or DNA vector. In some embodiments, the loop is between the first and second sequences. In these embodiments, and the first sequence and the second sequence hybridize to form a duplex region. The first sequence and second sequence are joined by a linker sequence, forming a “hairpin” or “stem-loop” structure. The shRNA can have complementary first sequences and second sequences at opposing ends of a single stranded molecule, so that the molecule can form a duplex region with the complementary sequence portions, and the strands are linked at one end of the duplex region by a linker (i.e. loop sequence). The linker, or loop sequence, can be either a nucleotide or non-nucleotide linker. The linker can interact with the first sequence, and optionally, second sequence through covalent bonds or non-covalent interactions.

[0084] Any suitable nucleotide loop sequence is envisaged as within the scope of the disclosure. An shRNA of this disclosure may include a nucleotide, non-nucleotide, or mixed nucleotide/non-nucleotide linker that joins the first sequence of the shRNA to the second sequence of the shRNA. A nucleotide loop sequence can be >2 nucleotides in length, for example about 4, 5, 6, 7, 8, 9, 10, 11, 12, 13, 14, or 15 nucleotides in length.

[0085] Examples of a non-nucleotide linker include an abasic nucleotide, polyether, polyamine, polyamide, peptide, carbohydrate, lipid, polyhydrocarbon, or other polymeric agents, for example polyethylene glycols such as those having from 2 to 100 ethylene glycol units. Some examples are described in Seela et al., Nucleic Acids Research, 1987, Vol. 15, pp. 3113-3129; Cload et al., J. Am. Chem. Soc, 1991, Vol. 113, pp. 6324-6326; Jaeschke et al., Tetrahedron Lett., 1993, Vol. 34, pp. 301; Arnold et al., WO 1989/002439; Usman et al., WO 1995/006731; Dudycz et al., WO 1995/011910, and Ferentz et al., J. Am. Chem. Soc, 1991, Vol. 113, pp. 4000-4002.

[0086] In some embodiments, the shRNA further comprises a 5′ flank sequence and a 3′ flank sequence. In some embodiments, wherein the 5′ flank sequence is joined to the 5′ end of the first sequence, and wherein the 3′ flank sequence is joined to the 3′ end of the second sequence.

[0087] Without wishing to be bound by theory, it is thought that flanking shRNA stem loop sequence with 5′ and 3′ sequences similar to those found in microRNAs can target the shRNA for processing by the endogenous microRNA processing machinery, increasing the effectiveness of shRNA processing. Alternatively, or in addition, flanking sequences may increase shRNA compatibility with polymerase II or polymerase III promoters, leading to more effective regulation of shRNA expression.

[0088] In some embodiments, the 5′ flank sequence is selected from SEQ ID NO. 8814-8816. In some embodiments, the 3′ flank sequence is selected from SEQ ID NO: 8817-8819. Illustrative flank sequence are shown in Table 4.

TABLE 4
Illustrative flank sequences

| SEQ ID NO | 5′ Flank Sequence |
|---|---|
| NA | GG |
| 8814 | ACACCAUGUUGCCAGUCUCUAGG |
| 8815 | UGAUAGCAAUGUCAGCAGUGCCU |
| 8816 | UAUUGCUGUUGACAGUGAGCGAC |
| SEQ ID NO | 3′ Flank Sequence |
| 8817 | UGGCGUCUGGCCCAACCACAC |
| 8818 | GUAAGGUUGACCAUACUCUAC |
| 8819 | UGCCUACUGCCUCGGACUUCA |

[0089] shRNAs of the disclosure may be generated exogenously by chemical synthesis, by in vitro transcription, or by cleavage of longer double-stranded RNA with Dicer or another appropriate nuclease with similar activity. Chemically synthesized siRNAs, produced from protected ribonucleoside phosphoramidites using a conventional DNA/RNA synthesizer, may be obtained from commercial suppliers such as Millipore Sigma (Houston, Tex.), Ambion Inc. (Austin, Tex.). Invitrogen (Carlsbad, Calif.), or Dharmacon (Lafayette, Colo.). siRNAs can be purified by extraction with a solvent or resin, precipitation, electrophoresis, chromatography, or a combination thereof, for example. Alternatively, siRNAs may be used with little if any purification to avoid losses due to sample processing.

[0090] In some embodiments, shRNAs of the disclosure can be produced using an expression vector into which a nucleic acid encoding the double stranded RNA has been cloned, for example under control of a suitable promoter.

### Activators

[0091] The disclosure provides a first ligand, an activator, and a first engineered receptor comprising the first ligand binding domain that binds to the first activator ligand.

[0092] The disclosure provides a first engineered receptor comprising an extracellular region, the extracellular region comprising a first ligand binding domain capable of specifically binding a first ligand that activates or promotes activation of the receptor, which promotes activation of effector cells expressing the receptor. The disclosure further provides a second engineered receptor comprising a second ligand binding domain capable of binding a second ligand, wherein binding of the second ligand by the second ligand binding domain inhibits or reduces activation of effector cells even in the presence of the first receptor bound to the first ligand.

[0093] As used herein, an “activator” or “activator ligand” refers to a first ligand that binds to a first, activator ligand binding domain (LBD) of an engineered receptor of the disclosure, such as a CAR or TCR, thereby mediating activation of a T cell expressing the engineered receptor. The activator is expressed by target cells, for example cancer cells, and may also be expressed more broadly than just the target cells. For example the activator can be expressed on some, or all types of normal, non-target cells.

[0094] In some embodiments, the first ligand is a peptide ligand from any of the activator targets disclosed herein. In some embodiments, the first ligand is a peptide antigen complexed with a major histocompatibility (MHC) class I complex (peptide MHC, or pMHC), for example an MHC complex comprising human leukocyte antigen A*02 allele (HLA-A*02).

[0095] Target cell-specific first activator ligands comprising peptide antigens complexed with pMHC comprising any of human leukocyte antigen (HLA) HLA-A, HLA-B, HLA-C, HLA-E, HLA-F, and HLA-G are envisaged as within the scope of the disclosure. In some embodiments, the first ligand comprises a pMHC comprising HLA-A. HLA-A receptors are heterodimers comprising a heavy a chain and smaller β chain. The α chain is encoded by a variant of HLA-A, while the β chain (β2-microglobulin) is an invariant. There are several thousand HLA-A gene variants, all of which fall within the scope of the instant disclosure. In some embodiments, the MHC-I comprises a human leukocyte antigen A*02 allele (HLA-A*02).

[0096] In some embodiments, the first activator ligand comprises a pMHC comprising HLA-B. Hundreds of versions (alleles) of the HLA-B gene are known, each of which is given a particular number (such as HLA-B*27).

[0097] In some embodiments, the first activator ligand comprises a pMHC comprising HLA-C. HLA-C belongs to the HLA class I heavy chain paralogues. This class I molecule is a heterodimer consisting of a heavy chain and a light chain (beta-2 microglobulin). Over one hundred HLA-C alleles are known in the art.

[0098] In some embodiments, the first activator ligand comprises a pMHC comprising HLA-A. In some embodiments, the first activator ligand comprises a pMHC comprising HLA-B. In some embodiments, the first activator ligand comprises a pMHC comprising HLA-C. In some embodiments, the first activator ligand comprises a pMHC comprising HLA-E. In some embodiments, the first activator ligand comprises a pMHC comprising HLA-F. In some embodiments, the first activator ligand comprises a pMHC comprising HLA-G.

[0099] In some embodiments, the first activator ligand comprises HLA-A. In some embodiments, the first activator ligand comprises HLA-B. In some embodiments, the first activator ligand comprises HLA-C. In some embodiments, the first activator ligand comprises HLA-E. In some embodiments, the first activator ligand comprises HLA-F. In some embodiments, the first activator ligand comprises HLA-G. In some embodiments, the first activator ligand comprises HLA-A, HLA-B, HLA-C, HLA-E, HLA-F or HLA-G.

[0100] In some embodiments, the first, activator ligand binding domain comprises an scFv domain.

[0101] In some embodiments, the first, activator ligand binding domain comprises a Vβ-only ligand binding domain.

[0102] In some embodiments, the first, activator ligand binding domain comprises an antigen binding domain isolated or derived from a T cell receptor (TCR). For example, the first, activator ligand binding domain comprises TCR α and β chain variable domains.

[0103] In some embodiments, the first, activator ligand and the second, inhibitor ligand are not the same.

[0104] In some embodiments, the first, activator ligand is expressed by target cells and is not expressed by non-target cells (i.e. normal cells not targeted by the adoptive cell therapy). In some embodiments, the target cells are cancer cells and the non-target cells are non-cancerous cells.

[0105] In some embodiments, the activator ligand has high cell surface expression on the target cells. This high cell surface expression confers the ability to deliver large activation signals. Methods of measuring cell surface expression will be known to the person of ordinary skill in the art and include, but are not limited to, immunohistochemistry using an appropriate antibody against the activator ligand, followed by microscopy or fluorescence activated cell sorting (FACS).

[0106] In some embodiments, the activator ligand is encoded by a gene with an essential cellular function. Essential cellular functions are functions required for a cell to live, and include protein and lipid synthesis, cell division, replication, respiration, metabolism, ion transport, and providing structural support for tissues. Selecting activator ligands encoded by genes with essential cellular functions prevents loss of the activator ligand due to aneuploidy in cancer cells, and makes gene encoding the activator ligand less likely to undergo mutagenesis during the evolution of the cancer. In some embodiments, the activator ligand is encoded by a gene that is haploinsufficient, i.e. loss of copies of the gene encoding the activator ligand are not tolerated by the cell and lead to cell death or a disadvantageous mutant phenotype.

[0107] In some embodiments, the activator ligand is present on all target cells. In some embodiments, the target cells are cancer cells.

[0108] In some embodiments, the activator ligand is present on a plurality of target cells. In some embodiments, the target cells are cancer cells. In some embodiments, the activator ligand is present on at least 50%, at least 60%, at least 70%, at least 80%, at least 85%, at least 90%, at least 95%, at least 96%, at least 97%, at least 98%, at least 99%, at least 99.5% or at least 99.9% of target cells. In some embodiments, the activator ligand is present on at least 95% target cells. In some embodiments, the activator ligand is present on at least 99% target cells.

[0109] In some embodiments, the activator ligand is present on all cells (ubiquitous activator ligands). Activator ligands can be expressed on all cells, if, for example, the second inhibitor ligand is also expressed on all cells except the target cells.

[0110] In some embodiments, the first, activator ligand is expressed by a plurality of target cells and a plurality of non-target cells. In some embodiments, the plurality of non-target cells expresses both the first, activator ligand and the second inhibitor ligand.

[0111] In some embodiments, and the first, activator ligand and second, inhibitor ligand are present on the plurality of non-target target cells at a ratio of about 1:100 to about 100:1 of the first ligand to the second ligand. In some embodiments, and the first, activator ligand and second, inhibitor ligand are present on the plurality of non-target target cells at a ratio of about 1:50 to about 50:1 of the first ligand to the second ligand. In some embodiments, and the first, activator ligand and second, inhibitor ligand are present on the plurality of non-target target cells at a ratio of about 1:25 to about 25:1 of the first ligand to the second ligand. In some embodiments, and the first, activator ligand and second, inhibitor ligand are present on the plurality of non-target target cells at a ratio of about 1:10 to about 10:1 of the first ligand to the second ligand. In some embodiments, and the first, activator ligand and second, inhibitor ligand are present on the plurality of non-target target cells at a ratio of about 1:5 to about 5:1 of the first ligand to the second ligand. In some embodiments, and the first, activator ligand and second, inhibitor ligand are present on the plurality of non-target target cells at a ratio of about 1:3 to about 3:1 of the first ligand to the second ligand. In some embodiments, and the first, activator ligand and second, inhibitor ligand are present on the plurality of non-target target cells at a ratio of about 1:2 to about 2:1 of the first ligand to the second ligand. In some embodiments, and the first, activator ligand and second, inhibitor ligand are present on the plurality of non-target target cells at a ratio of about 1:1.

[0112] The first, activator ligand is recognized by a first ligand binding domain (sometimes referred to herein as the activator LBD).

[0113] Exemplary activator ligands include ligands selected from the group consisting of cell adhesion molecules, cell-cell signaling molecules, extracellular domains, molecule involved in chemotaxis, glycoproteins, G protein-coupled receptors, transmembrane proteins, receptors for neurotransmitters and voltage gated ion channels. In some embodiments, the first, activator ligand is transferrin receptor (TFRC) or a peptide antigen thereof. Human transferrin receptor is described in NCBI record No. AAA61153.1, the contents of which are incorporated herein by reference.

[0114] In some embodiments, the activator ligand is a tumor specific antigen (TSA). In some embodiments, the tumor specific antigen is mesothelin (MSLN), CEA cell adhesion molecule 5 (CEACAM5, or CEA), epidermal growth factor receptor (EGFR) or a peptide antigen thereof. In some embodiments, the TSA is MSLN, CEA, EGFR, delta like canonical Notch ligand 4 (DLL4), mucin 16, cell surface associated (MUC 16 also known as CA125), ganglioside GD2 (GD2), receptor tyrosine kinase like orphan receptor 1 (ROR1), erb-b2 receptor tyrosine kinase 2 (HER2/NEU) or a peptide antigen thereof. Exemplary mouse and humanized scFv antigen binding domains targeting TSAs are shown in Table 5 below:

TABLE 5
Exemplary scFv antigen binding domains that target
tumor specific antigens (TSAs)
MSLN binding domains

| | |
|---|---|
| QVQLVQSGAEVEKPGASVKVSCKASGYTFTDYYMHWVRQAPGQGLEWMGWINP | DNA |
| NSGGTNYAQKFQGRVTMTRDTSISTAYMELSRLRSDDTAVYYCASGWDFDYWG | Sequence: SEQ |
| QGTLVTVSSGGGGSGGGGSGGGGSGGDIVMTQSSSLSASVGDRVTITCRASQS | ID NO: 87 |
| IRYYLSWYQQKPGKAPKLLIYTASILQNGVPSRFSGSGSGTDFTLTISSLQPE | |
| DFATYYCLQTYTTPDFGPGTKVEIK (SEQ ID NO: 86) | |
| QVQLVQSGAEVRAPGASVKISCKASGFTFRGYYIHWVRQAPGQGLEWMGIINP | DNA |
| SGGSRAYAQKFQGRVTMTRDTSTSTVYMELSSLRSDDTAMYYCARTASCGGDC | Sequence: SEQ |
| YYLDYWGQGTLVTVSSGGGGSGGGGSGGGGSGGDIQMTQSPPTLSASVGDRVT | ID NO: 89 |
| ITCRASENVNIWLAWYQQKPGKAPKLLIYKSSSLASGVPSRFSGSGSGAEFTL | |
| TISSLQPDDFATYYCQQYQSYPLTFGGGTKVEIK (SEQ ID NO: 88) | |
| QVQLVQSGAEVKKPGASVKVSCKASGYSFTGYTMNWVRQAPGQRLEWMGLIT | DNA |
| PYNGASSYNQKFRGRVTITRDTSASTAYMELSSLRSEDTAVYYCARGGYDGR | Sequence: SEQ |
| GFDYWGQGTTVTVSSGGGGSGGGGSGGGGSGGDIQMTQSPSSLSASVGDRVT | ID NO: 91 |
| ITCSASSSVSYMHWYQQKPGKAPKRLIYDTSKLASGVPSRFSGSGSGTEFTL | |
| TISSLQPEDFATYYCQQWSGYPLTFGQGTKLEIK (SEQ ID NO: 90) | |
| QVQLQQSGPELEKPGASVKISCKASGYSFTGYTMNWVKQSHGKSLEWIGLIT | C-002360 |
| PYNGASSYNQKFRGKATLTVDKSSSTAYMDLLSLTSEDSAVYFCARGGYDGR | MSLN_(S5M) |
| GFDYWGQGTTVTVSSGGGGSGGGGSGGGGSGGDIELTQSPAIMSASPGEKVT | DNA |
| MTCSASSSVSYMHWYQQKSGTSPKRWIYDTSKLASGVPGRFSGSGSGNSYSL | Sequence: SEQ |
| TISSVEAEDDATYYCQQWSGYPLTFGAGTKLEIK (SEQ ID NO: 92) | ID NO: 93 |
| QVQLQESGPGLVKPSQTLSLTCTVSGGSISSGDYYWSWIRQPPGKGLEWIGY | ND |
| IYYSGSTYYNPSLKSRVTISVDTSKNQFSLKLSSVTAADTAVYYCAREDVVK | |
| GAFDIWGQGTMVTVSSGGGGSGGGGSGGGGSGGDIQMTQSPSSLSASVGDRV | |
| TITCRASQSISSYLNWYQQKPGKAPKLLIYAASSLQSGVPSRFSGSGSGTDF | |
| TLTISSLQPEDFATYYCQQSYSTPLTFGGGTKVEIK | |
| (SEQ ID NO: 8917) | |

CEACAM5 binding domains

| | |
|---|---|
| QVQLQQSGAELVRSGTSVKLSCTASGFNIKDSYMHWLRQGPEQGLEWIGWID | DNA |
| PENGDTEYAPKFQGKATFTTDTSSNTAYLQLSSLTSEDTAVYYCNEGTPTGP | Sequence: SEQ |
| YYFDYWGQGTTVTVSSGGGGSGGGGSGGGGSGGENVLTQSPAIMSASPGEKV | ID NO: 95 |
| TITCSASSSVSYMHWFQQKPGTSPKLWIYSTSNLASGVPARFSGSGSGTSYS | |
| LTISRMEAEDAATYYCQQRSSYPLTFGAGTKLELK (SEQ ID NO: 94) | |
| QVQLVQSGAEVKKPGASVKVSCKASGFNIKDSYMHWVRQAPGQGLEWMGWID | DNA |
| PENGDTEYAPKFQGRVTMTTDTSTSTAYMELRSLRSDDTAVYYCNEGTPTGP | Sequence: SEQ |
| YYFDYWGQGTTVTVSSGGGGSGGGGSGGGGSGGEIVLTQSPATLSLSPGERA | ID NO: 97 |
| TLSCSASSSVSYMHWYQQKPGLAPRLLIYSTSNLASGIPDRFSGSGSGTDFT | |
| LTISRLEPEDFAVYYCQQRSSYPLTFGQGTKLEIK (SEQ ID NO: 96) | |
| EVQLAESGGGLVQPGGSLRLSCAASGFTFSSDAMSWVRQAPGKGLEWVSAIS | DNA |
| GSGGSTYYADSVKGRFTISRDNSKNTLYLQMNSLRAEDTAVYYCAKSNEFLF | Sequence: SEQ |
| DYWGQGTLVTVSSGGGGSGGGGSGGGGSGGSSELTQDPAVSVALGQTVRITC | ID NO: 99 |
| QGDSLRSSYASWYRQRPGQAPVLVIYGKNNRPSGIPDRFSGSSSGNTASLTI | |
| TGAQAEDEADYYWNSSYAWLPYWFGGGTKLTVLG (SEQ ID NO: 98) | |
| QVQLEQSGAGVVKPGASVKLSCKASGFNIKDSYMHWLRQGPGQRLEWIGWID | DNA |
| PENGDTEYAPKFQGKATFTTDTSANTAYLGLSSLRPEDTAVYYCNEGTPTGP | Sequence: SEQ |
| YYFDYWGQGTLVTVSSGGGGSGGGGSGGGGSGGENVLTQSPSSMSVSVGDRV | ID NO: 101 |
| NIACSASSSVPYMHWLQQKPGKSPKLLIYLTSNLASGVPSRFSGSGSGTDYS | |
| LTISSVQPEDAATYYCQQRSSYPLTFGGGTKLEIK (SEQ ID NO: 100) | |
| QVQLVQSGSELKKPGASVKVSCKASGYTFTEFGMNWVRQAPGQGLEWMGWIN | DNA |
| TKTGEATYVEEFKGRFVFSLDTSVSTAYLQISSLKAEDTAVYYCARWDFAYY | Sequence: SEQ |
| VEAMDYWGQGTTVTVSSGGGGSGGGGSGGGGSGGDIQMTQSPSSLSASVGDR | ID NO: 283 |
| VTITCKASQNVGTNVAWYQQKPGKAPKLLIYSASYRYSGVPSRFSGSGSGTD | |
| FTLTISSLQPEDFATYYCHQYYTYPLFTFGQGTKLEIK | |
| (SEQ ID NO: 282) | |
| QVQLVQSGAEVKKPGASVKVSCKASGYTFTEFGMNWVRQAPGQGLEWMGWIN | DNA Sequence: |
| TKTGEATYVEEFKGRVTFTTDTSTSTAYMELRSLRSDDTAVYYCARWDFAYY | SEQ ID NO: 285 |
| VEAMDYWGQGTTVTVSSGGGGSGGGGSGGGGSGGDIQMTQSPSSLSASVGDR | |
| VTITCKASAAVGTYVAWYQQKPGKAPKLLIYSASYRKRGVPSRFSGSGSGTD | |
| FTLTISSLQPEDFATYYCHQYYTYPLFTFGQGTKLEIK | |
| (SEQ ID NO: 284) | |
| QVQLVQSGSELKKPGASVKVSCKASGYTFTEFGMNWVRQAPGQGLEWMGWIN | DNA Sequence: |
| TKTGEATYVEEFKGRFVFSLDTSVSTAYLQISSLKAEDTAVYYCARWDFAHY | SEQ ID NO: 287 |
| FQTMDYWGQGTTVTVSSGGGGSGGGGSGGGGSGGDIQMTQSPSSLSASVGDR | |
| VTITCKASAAVGTYVAWYQQKPGKAPKLLIYSASYRKRGVPSRFSGSGSGTD | |
| FTLTISSLQPEDFATYYCHQYYTYPLFTFGQGTKLEIK | |
| (SEQ ID NO: 286) | |

EGFR binding domains

| | |
|---|---|
| QVQLVESGGGVVQPGRSLRLSCAASGFTFSTYGMHWVRQAPGKGLEWVAVIW | DNA |
| DDGSYKYYGDSVKGRFTISRDNSKNTLYLQMNSLRAEDTAVYYCARDGITMV | Sequence: SEQ |
| RGVMKDYFDYWGQGTLVTVSSGGGGSGGGGSGGGGSGGAIQLTQSPSSLSAS | ID NO: 103 |
| VGDRVTITCRASQDISSALVWYQQKPGKAPKLLIYDASSLESGVPSRFSGSE | |
| SGTDFTLTISSLQPEDFATYYCQQFNSYPLTFGGGTKVEIK | |
| (SEQ ID NO: 102) | |
| AIQLTQSPSSLSASVGDRVTITCRASQDISSALVWYQQKPGKAPKLLIYDAS | DNA |
| SLESGVPSRFSGSESGTDFTLTISSLQPEDFATYYCQQFNSYPLTFGGGTKV | Sequence: SEQ |
| EIKGGGGSGGGGSGGGGSGGQVQLVESGGGVVQPGRSLRLSCAASGFTFSTY | ID NO: 105 |
| GMHWVRQAPGKGLEWVAVIWDDGSYKYYGDSVKGRFTISRDNSKNTLYLQMN | |
| SLRAEDTAVYYCARDGITMVRGVMKDYFDYWGQGTLVTVSS | |
| (SEQ ID NO: 104) | |
| QIQLVQSGPELKKPGETVKISCKASGYTFTEYPIHWVKQAPGKGFKWMGMIY | DNA Sequence: |
| TDIGKPTYAEEFKGRFAFSLETSASTAYLQINNLKNEDTATYFCVRDRYDSL | SEQ ID NO: 107 |
| FDYWGQGTTLTVSSGGGGSGGGGSGGGGSGGDVVMTQTPLSLPVSLGDQASI | |
| SCRSSQSLVHSNGNTYLHWYLQKPGQSPKLLIYKVSNRFSGVPDRFSGSGSG | |
| TDFTLKISRVEAEDLGVYFCSQSTHVPWTFGGGTKLEIK | |
| (SEQ ID NO: 106) | |
| DVVMTQTPLSLPVSLGDQASISCRSSQSLVHSNGNTYLHWYLQKPGQSPKLL | DNA Sequence: |
| IYKVSNRFSGVPDRFSGSGSGTDFTLKISRVEAEDLGVYFCSQSTHVPWTFG | SEQ ID NO: 109 |
| GGTKLEIKGGGGSGGGGSGGGGSGGQIQLVQSGPELKKPGETVKISCKASGY | |
| TFTEYPIHWVKQAPGKGFKWMGMIYTDIGKPTYAEEFKGRFAFSLETSASTA | |
| YLQINNLKNEDTATYFCVRDRYDSLFDYWGQGTTLTVSS | |
| (SEQ ID NO: 108) | |
| EMQLVESGGGFVKPGGSLKLSCAASGFAFSHYDMSWVRQTPKQRLEWVAYIA | DNA Sequence: |
| SGGDITYYADTVKGRFTISRDNAQNTLYLQMSSLKSEDTAMFYCSRSSYGNN | SEQ ID NO: 111 |
| GDALDFWGQGTSVTVSSGGGGSGGGGSGGGGSGGDVVMTQTPLSLPVSLGDQ | |
| ASISCRSSQSLVHSNGNTYLHWYLQKPGQSPKLLIYKVSNRFSGVPDRFSGS | |
| GSGTDFTLKISRVEAEDLGVYFCSQSTHVLTFGSGTKLEIK | |
| (SEQ ID NO: 110) | |
| DVVMTQTPLSLPVSLGDQASISCRSSQSLVHSNGNTYLHWYLQKPGQSPKLL | DNA Sequence: |
| IYKVSNRFSGVPDRFSGSGSGTDFTLKISRVEAEDLGVYFCSQSTHVLTFGS | SEQ ID NO: 113 |
| GTKLEIKGGGGSGGGGSGGGGSGGEMQLVESGGGFVKPGGSLKLSCAASGFA | |
| FSHYDMSWVRQTPKQRLEWVAYIASGGDITYYADTVKGRFTISRDNAQNTLY | |
| LQMSSLKSEDTAMFYCSRSSYGNNGDALDFWGQGTSVTVSS | |
| (SEQ ID NO: 112) | |
| QVQLKQSGPGLVQPSQSLSITCTVSGFSLTNYGVHWVRQSPGKGLEWLGVIW | DNA Sequence: |
| SGGNTDYNTPFTSRLSINKDNSKSQVFFKMNSLQSNDTAIYYCARALTYYDY | SEQ ID NO: 115 |
| EFAYWGQGTLVTVSAGGGGSGGGGSGGGGSGGDILLTQSPVILSVSPGERVS | |
| FSCRASQSIGTNIHWYQQRTNGSPRLLIKYASESISGIPSRFSGSGSGTDFT | |
| LSINSVESEDIADYYCQQNNNWPTTFGAGTKLELK | |
| (SEQ ID NO: 114) | |
| QVQLVQSGAEVKKPGASVKVSCKASGYTFTSHWMHWVRQAPGQGLEWIGEFN | DNA Sequence: |
| PSNGRTNYNEKFKSKATMTVDTSTNTAYMELSSLRSEDTAVYYCASRDYDYD | SEQ ID NO: 117 |
| GRYFDYWGQGTLVTVSSGGGGSGGGGSGGGGSGGDIQMTQSPSSLSASVGDR | |
| VTITCSASSSVTYMYWYQQKPGKAPKLLIYDTSNLASGVPSRFSGSGSGTDY | |
| TFTISSLQPEDIATYYCQQWSSHIFTFGQGTKVEIK | |
| (SEQ ID NO: 116) | |
| QVQLQESGPGLVKPSETLSLTCTVSGGSVSSGDYYWTWIRQSPGKGLEWIGH | DNA Sequence: |
| IYYSGNTNYNPSLKSRLTISIDTSKTQFSLKLSSVTAADTAIYYCVRDRVTG | SEQ ID NO: 119 |
| AFDIWGQGTMVTVSSGGGGSGGGGSGGGGSGGDIQMTQSPSSLSASVGDRVT | |
| ITCQASQDISNYLNWYQQKPGKAPKLLIYDASNLETGVPSRFSGSGSGTDFT | |
| FTISSLQPEDIATYFCQHFDHLPLAFGGGTKVEIK | |
| (SEQ ID NO: 118) | |
| QVQLQESGPGLVKPSQTLSLTCTVSGGSISSGDYYWSWIRQPPGKGLEWIG | ND |
| YIYYSGSTDYNPSLKSRVTMSVDTSKNQFSLKVNSVTAADTAVYYCARVSI | |
| FGVGTFDYWGQGTLVTVSSGGGGSGGGGSGGGGSGGEIVMTQSPATLSLSP | |
| GERATLSCRASQSVSSYLAWYQQKPGQAPRLLIYDASNRATGIPARFSGSG | |
| SGTDFTLTISSLEPEDFAVYYCHQYGSTPLTFGGGTKAEIK | |
| (SEQ ID NO: 391) | |

CD19 Binding Domains

| | |
|---|---|
| DIQMTQTTSSLSASLGDRVTISCRASQDISKYLNWYQQKPDGTVKLLIYHT | DNA |
| SRLHSGVPSRFSGSGSGTDYSLTISNLEQEDIATYFCQQGNTLPYTFGGGT | Sequence: SEQ |
| KLEITGGGGSGGGGSGGGGSEVKLQESGPGLVAPSQSLSVTCTVSGVSLPD | ID NO: 276 |
| YGVSWIRQPPRKGLEWLGVIWGSETTYYNSALKSRLTIIKDNSKSQVFLKM | |
| NSLQTDDTAIYYCAKHYYYGGSYAIVIDYWGQGTSVTVSS | |
| (SEQ ID NO: 275) | |
| DIQMTQTTSSLSASLGDRVTISCRASQDISKYLNWYQQKPDGTVKLLIYHT | DNA |
| SRLHSGVPSRFSGSGSGTDYSLTISNLEQEDIATYFCQQGNTLPYTFGGGT | Sequence: SEQ |
| KLEITGGGGSGGGGSGGGGSGGEVKLQESGPGLVAPSQSLSVTCTVSGVSL | ID NO: 278 |
| PDYGVSWIRQPPRKGLEWLGVIWGSETTYYNSALKSRLTIIKDNSKSQVFL | |
| KMNSLQTDDTAIYYCAKHYYYGGSYAMDYWGQGTSVTVSS | |
| (SEQ ID NO: 277) | |

[0115] In some embodiments, the activator ligand is MSLN or a peptide antigen thereof, and the activator ligand binding domain comprises a MSLN binding domain. In some embodiments, the MSLN ligand binding domain comprises an scFv domain. In some embodiments, the MSLN ligand binding domain comprises a sequence of SEQ ID NO: 86, SEQ ID NO: 88, SEQ ID NO: 90 or SEQ ID NO: 92. In some embodiments, the MSLN ligand binding domain comprises a sequence at least 90%, at least 95% or at least 99% identical to SEQ ID NO: 86, SEQ ID NO: 88, SEQ ID NO: 90 or SEQ ID NO: 92. In some embodiments, the MSLN ligand binding domain is encoded by a sequence comprising SEQ ID NO: 87, SEQ ID NO: 89, SEQ ID NO: 91 or SEQ ID NO: 93. In some embodiments, the MSLN ligand binding domain is encoded by a sequence having at least 80% identity, at least 85% identity, at least 90% identity, at least 95% identity or at least 99% identity to a sequence of SEQ ID NO: 87, SEQ ID NO: 89, SEQ ID NO: 91 or SEQ ID NO: 93.

[0116] In some embodiments, the activator ligand is CEA or a peptide antigen thereof, and the activator ligand binding domain comprises a CEA binding domain. In some embodiments, the CEA ligand binding domain comprises an scFv domain. In some embodiments, the CEA ligand binding domain comprises a sequence of SEQ ID NO: 94, SEQ ID NO: 96, SEQ ID NO: 98, SEQ ID NO: 100, SEQ ID NO: 282, SEQ ID NO: 284 or SEQ ID NO: 286. In some embodiments, the CEA ligand binding domain comprises a sequence at least 90%, at least 95% or at least 99% identical to SEQ ID NO: 94, SEQ ID NO: 96, SEQ ID NO: 98, SEQ ID NO: 100, SEQ ID NO: 282, SEQ ID NO: 284 or SEQ ID NO: 286. In some embodiments, the CEA ligand binding domain is encoded by a sequence comprising SEQ ID NO: 95, SEQ ID NO: 97, SEQ ID NO: 99, SEQ ID NO: 101, SEQ ID NO: 283, SEQ ID NO: 285 or SEQ ID NO: 287. In some embodiments, the CEA ligand binding domain is encoded by a sequence having at least 80% identity, at least 85% identity, at least 90% identity, at least 95% identity or at least 99% identity to a sequence of SEQ ID NO: 95, SEQ ID NO: 97, SEQ ID NO: 99, SEQ ID NO: 101, SEQ ID NO: 283, SEQ ID NO: 285 or SEQ ID NO: 287.

[0117] In some embodiments, the activator ligand is CEA or a peptide antigen thereof, and the activator ligand binding domain comprises a CEA binding domain. In some embodiments, the CEA ligand binding domain comprises a CDR-H1 of EFGMN (SEQ ID NO: 294), a CDR-H2 of WINTKTGEATYVEEFKG (SEQ ID NO: 295), a CDR-H3 of WDFAYYVEAMDY (SEQ ID NO: 296) or WDFAHYFQTMDY (SEQ ID NO: 297), a CDR-L1 of KASQNVGTNVA (SEQ ID NO: 298) or KASAAVGTYVA (SEQ ID NO: 299), a CDR-L2 of SASYRYS (SEQ ID NO: 300) or SASYRKR (SEQ ID NO: 301), and a CDR-L3 of HQYYTYPLFT (SEQ ID NO: 302) or sequences having at least 85% or at least 95% identity thereto. In some embodiments, a CEA scFv comprises a CDR-H1 of EFGMN (SEQ ID NO: 294), a CDR-H2 of WINTKTGEATYVEEFKG (SEQ ID NO: 295), a CDR-H3 of WDFAYYVEAMDY (SEQ ID NO: 296) or WDFAHYFQTMDY (SEQ ID NO: 297), a CDR-L1 of KASQNVGTNVA (SEQ ID NO: 298) or KASAAVGTYVA (SEQ ID NO: 299), a CDR-L2 of SASYRYS (SEQ ID NO: 300) or SASYRKR (SEQ ID NO: 301) and a CDR-L3 of HQYYTYPLFT (SEQ ID NO: 302). In some embodiments, a CEA binding domain comprises a CDR-H1 of EFGMN (SEQ ID NO: 294), a CDR-H2 of WINTKTGEATYVEEFKG (SEQ ID NO: 295), a CDR-H3 of WDFAYYVEAMDY (SEQ ID NO: 296), a CDR-L1 of KASQNVGTNVA (SEQ ID NO: 298), a CDR-L2 of SASYRYS (SEQ ID NO: 300) and a CDR-L3 of HQYYTYPLFT (SEQ ID NO: 302). In some embodiments, a CEA scFv comprises a CDR-H1 of EFGMN (SEQ ID NO: 294), a CDR-H2 of WINTKTGEATYVEEFKG (SEQ ID NO: 295), a CDR-H3 of WDFAYYVEAMDY (SEQ ID NO: 296), a CDR-L1 of KASAAVGTYVA (SEQ ID NO: 299), a CDR-L2 of SASYRKR, and a CDR-L3 of HQYYTYPLFT (SEQ ID NO: 302). In some embodiments, a CEA binding domain comprises a CDR-H1 of EFGMN (SEQ ID NO: 294), a CDR-H2 of WINTKTGEATYVEEFKG (SEQ ID NO: 295), a CDR-H3 of WDFAHYFQTMDY (SEQ ID NO: 297), a CDR-L1 of KASAAVGTYVA (SEQ ID NO: 299), a CDR-L2 of SASYRKR, and a CDR-L3 of HQYYTYPLFT (SEQ ID NO: 302).

[0118] In some embodiments, the activator ligand is CEA or a peptide antigen thereof, and the activator receptor is a CEA CAR. In some embodiments, the CEA CAR comprises sequence at least 90%, at least 95% or at least 99% identical to SEQ ID NO: 288, SEQ ID NO: 290 or SEQ ID NO: 292. In some embodiments, the CEA CAR comprises or consists essentially of SEQ ID NO: 288, SEQ ID NO: 290 or SEQ ID NO: 292. In some embodiments, the CEA CAR is encoded by a sequence comprising or consisting essentially of SEQ ID NO: 289, SEQ ID NO: 291 or SEQ ID NO: 293. In some embodiments, the CEA CAR is encoded by a sequence having at least 80% identity, at least 85% identity, at least 90% identity, at least 95% identity or at least 99% identity to SEQ ID NO: 289, SEQ ID NO: 291 or SEQ ID NO: 293.

[0119] In some embodiments, the activator ligand is EGFR or a peptide antigen thereof, and the activator ligand binding domain comprises an EGFR binding domain. In some embodiments, the EGFR ligand binding domain comprises an scFv domain. In some embodiments, the EGFR ligand binding domain comprises a sequence of SEQ ID NO: 102, SEQ ID NO: 104, SEQ ID NO: 106, SEQ ID NO: 108, SEQ ID NO: 110, SEQ ID NO: 112, SEQ ID NO: 114, SEQ ID NO: 116, SEQ ID NO: 118 or SEQ ID NO: 391. In some embodiments, the EGFR ligand binding domain comprises a sequence at least 90%, at least 95% or at least 99% identical to SEQ ID NO: 102, SEQ ID NO: 104, SEQ ID NO: 106, SEQ ID NO: 108, SEQ ID NO: 110, SEQ ID NO: 112, SEQ ID NO: 114, SEQ ID NO: 116, SEQ ID NO: 118 or SEQ ID NO: 391. In some embodiments, the EGFR ligand binding domain is encoded by a sequence comprising SEQ ID NO: 103, SEQ ID NO: 104, SEQ ID NO: 107, SEQ ID NO: 109, SEQ ID NO: 111, SEQ ID NO: 113, SEQ ID NO: 115, SEQ ID NO: 117 or SEQ ID NO: 119. In some embodiments, the EGFR ligand binding domain is encoded by a sequence having at least 80% identity, at least 85% identity, at least 90% identity, at least 95% identity or at least 99% identity to a sequence of SEQ ID NO: 103, SEQ ID NO: 104, SEQ ID NO: 107, SEQ ID NO: 109, SEQ ID NO: 111, SEQ ID NO: 113, SEQ ID NO: 115, SEQ ID NO: 117 or SEQ ID NO: 119.

[0120] In some embodiments, the activator ligand is EGFR or a peptide antigen thereof, and the activator ligand binding domain comprises an EGFR ligand binding domain. In some embodiments, the EGFR binding domain comprises a VH and/or a VL domain selected from the group disclosed in Table 6 or a sequence having at least 90% identity thereto. In some embodiments, the EGFR ligand binding domain comprises a VH domain selected from the group consisting of SEQ ID NO: 120, SEQ ID NO: 122, SEQ ID NO: 124, SEQ ID NO: 126, SEQ ID NO: 128 and SEQ ID NO: 130. In some embodiments, the EGFR ligand binding domain comprises a VH selected from the group consisting of SEQ ID NO: 120, SEQ ID NO: 122, SEQ ID NO: 124, SEQ ID NO: 126, SEQ ID NO: 128 and SEQ ID NO: 130 or a sequence having at least 90%, at least 95% or at least 99% identity thereto. In some embodiments, the EGFR ligand binding domain comprises a VL domain selected from the group consisting of SEQ ID NO: 121, SEQ ID NO: 123, SEQ ID NO: 125, SEQ ID NO: 127, SEQ ID NO: 129 and SEQ ID NO: 131. In some embodiments, the EGFR ligand binding domain comprises a VH selected from the group consisting of SEQ ID NO: 121, SEQ ID NO: 123, SEQ ID NO: 125, SEQ ID NO: 127, SEQ ID NO: 129 and SEQ ID NO: 131 or a sequence having at least 90%, at least 95% or at least 99% identity thereto.

TABLE 6
EGFR Variable Heavy (VH) and
Variable Light (VL) domains

| EGFR VH | EGFR VL |
|---|---|
| CT478, CT479: | CT478, CT479: |
| QVQLVESGGGVVQPG | AIQLTQSPSSLSASV |
| RSLRLSCAASGFTFS | GDRVTITCRASQDIS |
| TYGMHWVRQAPGKGL | SALVWYQQKPGKAPK |
| EWVAVIWDDGSYKYY | LLIYDASSLESGVPS |
| GDSVKGRFTISRDNS | RFSGSESGTDFTLTI |
| KNTLYLOMNSLRAED | SSLQPEDFATYYCQQ |
| TAVYYCARDGITMVR | FNSYPLTFGGGTKVE |
| GVMKDYFDYWGQGTL | IK |
| VTVSS | (SEQ ID NO: 121) |
| (SEQ ID NO: 120) | |
| CT480, CT481: | CT480, CT481: |
| QIQLVQSGPELKKPG | DVVMTQTPLSLPVSL |
| ETVKISCKASGYTFT | GDQASISCRSSQSLV |
| EYPIHWVKQAPGKGF | HSNGNTYLHWYLQKP |
| KWMGMIYTDIGKPTY | GQSPKLLIYKVSNRF |
| AEEFKGRFAFSLETS | SGVPDRFSGSGSGTD |
| ASTAYLQINNLKNED | FTLKISRVEAEDLGV |
| TATYFCVRDRYDSLF | YFCSQSTHVPWTFGG |
| DYWGQGTTLTVSS | GTKLEIK |
| (SEQ ID NO: 122) | (SEQ ID NO: 123) |
| CT482, CT483: | CT482, CT483: |
| EMQLVESGGGFVKPG | DVVMTQTPLSLPVSL |
| GSLKLSCAASGFAFS | GDQASISCRSSQSLV |
| HYDMSWVROTPKQRL | HSNGNTYLHWYLQKP |
| EWVAYIASGGDITYY | GQSPKLLIYKVSNRF |
| ADTVKGRFTISRDNA | SGVPDRFSGSGSGTD |
| QNTLYLQMSSLKSED | FTLKISRVEAEDLGV |
| TAMFYCSRSSYGNNG | YFCSQSTHVLTFGSG |
| DALDFWGQGTSVTVS | TKLEIK |
| S | (SEQ ID NO: 125) |
| (SEQ ID NO: 124) | |
| CT486: | CT486: |
| QVQLKQSGPGLVQPS | DILLTQSPVILSVSP |
| QSLSITCTVSGFSLT | GERVSFSCRASQSIG |
| NYGVHWVRQSPGKGL | TNIHWYQQRTNGSPR |
| EWLGVIWSGGNTDYN | LLIKYASESISGIPS |
| TPFTSRLSINKDNSK | RFSGSGSGTDFTLSI |
| SQVFFKMNSLQSNDT | NSVESEDIADYYCQQ |
| AIYYCARALTYYDYE | NNNWPTTFGAGTKLE |
| FAYWGQGTLVTVSA | LK |
| (SEQ ID NO: 126) | (SEQ ID NO: 127) |
| CT487: | CT487: |
| QVQLVQSGAEVKKPG | DIQMTQSPSSLSASV |
| ASVKVSCKASGYTFT | GDRVTITCSASSSVT |
| SHWMHWVRQAPGQGL | YMYWYQQKPGKAPKL |
| EWIGEFNPSNGRTNY | LIYDTSNLASGVPSR |
| NEKFKSKATMTVDTS | FSGSGSGTDYTFTIS |
| TNTAYMELSSLRSED | SLQPEDIATYYCQQW |
| TAVYYCASRDYDYDG | SSHIFTFGQGTKVEI |
| RYFDYWGQGTLVTVS | K |
| S | (SEQ ID NO: 129) |
| (SEQ ID NO: 128) | |
| CT488: | CT488: |
| QVQLQESGPGLVKPS | DIQMTQSPSSLSASV |
| ETLSLTCTVSGGSVS | GDRVTITCQASQDIS |
| SGDYYWTWIRQSPGK | NYLNWYQQKPGKAPK |
| GLEWIGHIYYSGNTN | LLIYDASNLETGVPS |
| YNPSLKSRLTISIDT | RFSGSGSGTDFTFTI |
| SKTQFSLKLSSVTAA | SSLQPEDIATYFCQH |
| DTAIYYCVRDRVTGA | FDHLPLAFGGGTKVE |
| FDIWGQGTMVTVSS | IK |
| (SEQ ID NO: 130) | (SEQ ID NO: 131) |

[0121] In some embodiments, the activator ligand is EGFR or a peptide antigen thereof, and the activator ligand binding domain is an EGFR ligand binding domain. In some embodiments, the EGFR binding domain comprises complementarity determining region (CDRs) selected from the group of CDRs disclosed in Table 7. In some embodiments, the EGFR ligand binding domain comprises CDRs having at least 9500 sequence identity to CDRs disclosed in Table 7. In some embodiments, the EGFR ligand binding domain comprises CDRs selected from SEQ ID NOs: 131-166. In some embodiments, the EGFR ligand binding domain comprises a heavy chain CDR 1 (CDR H1) selected from the group consisting of SEQ ID NOs: 132-137. In some embodiments, the EGFR ligand binding domain comprises a heavy chain CDR 2 (CDR H-2) selected from the group consisting of SEQ ID NOs: 138-143. In some embodiments, the EGFR ligand binding domain comprises a heavy chain CDR 3 (CDR H-3) selected from the group consisting of SEQ ID NOs: 144-149. In some embodiments, the EGFR ligand binding domain comprises a light chain CDR 1 (CDR L1) selected from the group consisting of SEQ ID NOs: 150-155. In some embodiments, the EGFR ligand binding domain comprises a light chain CDR 2 (CDR L2) selected from the group consisting of SEQ ID NOs: 156-160. In some embodiments, the EGFR ligand binding domain comprises a light chain CDR 3 (CDR L3) selected from the group consisting of SEQ ID NOs: 161-166. In some embodiments, the EGFR ligand binding domain comprises a CDR H1 selected from SEQ ID NOs: 132-137, a CDR H2 selected from SEQ ID NOs: 138-143, a CDR H3 selected from SEQ ID NOs: 144-149, a CDR L1 selected from SEQ ID NOs: 150-155, a CDR L2 selected from SEQ ID NOs: 156-160, and a CDR L3 selected from SEQ ID NOs: 156-160.

TABLE 7
EGFR antigen binding domain CDRs

| CDR H1 | CDR H2 | CDR H3 | CDR L1 | CDR L2 | CDR L3 |
|---|---|---|---|---|---|
| TYGMH | VIWDD | DGITM | RASQD | DASSL | QQFNS |
| (SEQ | GSYKY | VRGVM | ISSAL | ES | YPLT |
| ID | YGDSV | KDYFD | V | (SEQ | (SEQ |
| NO: | KG | Y | (SEQ | ID | ID |
| 132) | (SEQ | (SEQ | ID | NO: | NO: |
| | ID | ID | NO: | 156) | 161) |
| | NO: | NO: | 150) | | |
| | 138) | 144) | | | |
| EYPIH | MIYTD | DRYDS | RSSQS | KVSNR | SQSTH |
| (SEQ | IGKPT | LFDY | LVHSN | FS | VPWT |
| ID | YAEEF | (SEQ | GNTYL | (SEQ | (SEQ |
| NO: | KG | ID | H | ID | ID |
| 133) | (SEQ | NO: | (SEQ | NO: | NO: |
| | ID | 145) | ID | 157) | 162) |
| | NO: | | NO: | | |
| | 139) | | 151) | | |
| HYDMS | YIASG | SSYGN | RSSQS | KVSNR | SQSTH |
| (SEQ | GDITY | NGDAL | LVHSN | FS | VLT |
| ID | YADTV | DF | GNTYL | (SEQ | (SEQ |
| NO: | KG | (SEQ | H | ID | ID |
| 134) | (SEQ | ID | (SEQ | NO: | NO: |
| | ID | NO: | ID | 157) | 163) |
| | NO: | 146) | NO: | | |
| | 140) | | 152) | | |
| NYGVH | VIWSG | ALTYY | RASQS | YASES | QQNNN |
| (SEQ | GNTDY | DYEFA | IGTNI | IS | WPTT |
| ID | NTPFT | Y | H | (SEQ | (SEQ |
| NO: | S | (SEQ | (SEQ | ID | ID |
| 135) | (SEQ | ID | ID | NO: | NO: |
| | ID | NO: | NO: | 158) | 164) |
| | NO: | 147) | 153) | | |
| | 141) | | | | |
| SHWMH | EFNPS | RDYDY | SASSS | DTSNL | QQWSS |
| (SEQ | NGRTN | DGRYF | VTYMY | AS | HIFT |
| ID | YNEKF | DY | | (SEQ | (SEQ |
| NO: | KS | (SEQ | (SEQ | ID | ID |
| 136) | (SEQ | ID | ID | NO: | NO: |
| | ID | NO: | NO: | 159) | 165) |
| | NO: | 148) | 154) | | |
| | 142) | | | | |
| SGDYY | HIYYS | DRVTG | QASQD | DASNL | QHFDH |
| WT | GNTNY | AFDI | ISNYL | ET | LPLA |
| (SEQ | NPSLK | (SEQ | N | (SEQ | (SEQ |
| ID | S | ID | (SEQ | ID | ID |
| NO: | (SEQ | NO: | ID | NO: | NO: |
| 137) | ID | 149) | NO: | 160) | 166) |
| | NO: | | 155) | | |
| | 143) | | | | |

[0122] In some embodiments, the activator ligand is a pan-HLA ligand, and the activator binding domain is a pan-HLA binding domain, i.e. a binding domain that binds to and recognizes an antigenic determinant shared among products of the HLA A, B and C loci. Various single variable domains known in the art or disclosed herein are suitable for use in embodiments. Such scFvs include, for example and without limitation, the following mouse and humanized pan-HLA scFv antibodies. An exemplary pan-HLA ligand is W6/32, which recognizes a conformational epitope, reacting with HLA class I alpha3 and alpha2 domains. Illustrative pan-HLA scFv binding domains derived from W6/32 are shown in Table 8.

TABLE 8
Illustrative pan-HLA scFv binding domains derived from W6/32

| | Polynucleotide |
|---|---|
| Protein Sequence | Sequence |
| scFv (mouse): | scFv (mouse) SEQ |
| QVQLKQSGPGLVQPSQSLSLTCTVSGFSLTSYGVHWVRQPPGKGLEWLGVIWSG | ID NO: 168 |
| GSTDYNAAFISRLSIRKDNSKSQVFFKMNSLQADDTAIYYCARTFTTSTSAWFAYW | |
| GQGTLVTVSAGGGGSGGGGSGGGGSGGSIVMTQTPKFLLVSAGDRVTITCKASQ | |
| SVSNDVAWYQQKPGQSPICLLIYYASNRYTGVPDRFTGSGYGTDFTFTISTVQAED | |
| LAVYFCQQDYSSPPWTFGGGTKLEIR (SEQ ID NO: 167) | |
| scFv (humanized): | scFv (humanized) |
| QVQLQESGPGLVKPSQTLSLTCTVSGFSLTSYGVHWIRQPPGKGLEWIGVIWSGG | SEQ ID NO: 170 |
| STDYNAAFISRVTISVDTSKNQFSLKLSSVTAADTAVYYCARTFTTSTSAWFAYWG | |
| QGTLVTVSSGGGGSGGGGSGGGGSGGDIVMTQSPDSLAVSLGERATINCKASQS | |
| VSNDVAWYQQKPGQPPKLLIYYASNRYTGVPDRFSGSGSGTDFTLTISSLQAEDV | |
| AVYYCQQDYSSPPWTFGGGTKVEIK (SEQ ID NO: 169) | |
| scFv (humanized): | scFv (humanized) |
| EVQLLESGGGLVQPGGSLRLSCAASGFSLTSYGVHWVRQAPGKGLEWVSVIWSG | SEQ ID NO: 172 |
| GSTDYNAAFISRFTISRDNSKNTLYLQMNSLRAEDTAVYYCARTFTTSTSAWFAY | |
| WGQGTLVTVSSGGGGSGGGGSGGGGSGGDIQMTQSPSSLSASVGDRVTITCKA | |
| SQSVSNDVAWYQQKPGKAPKLLIYYASNRYTGVPSRFSGSGSGTDFTFTISSLQPE | |
| DIATYYCQQDYSSPPWTFGGGTKVEIK (SEQ ID NO: 171) | |
| scFv (humanized): | scFv (humanized) |
| QVQLQESGPGLVKPSETLSLTCTVSGFSLTSYGVHWIRQPPGKGLEWIGVIWSGG | SEQ ID NO: 174 |
| STDYNAAFISRVTISRDTSKNQFSLKLSSVTAADTAVYYCARTFTTSTSAWFAYWG | |
| QGTLVTVSSGGGGSGGGGSGGGGSGGDIVMTQTPLSLSVTPGQPASISCKASQS | |
| VSNDVAWYLQKPGQSPQLLIYYASNRYTGVPDRFSGSGSGTDFTLKISRVEAEDV | |
| GVYYCQQDYSSPPWTFGGGTKVEIK (SEQ ID NO: 173) | |
| scFv (humanized): | scFv (humanized) |
| QVQLVESGGGVVQPGRSLRLSCAVSGFSLTSYGMHWVRQAPGKGLEWVAVIW | SEQ ID NO: 176 |
| SGGSTDYNAAFISRFTISRDNSKNTLYLQMNSLRAEDTAVYYCAKTFTTSTSAWFA | |
| YWGQGTLVTVSSGGGGSGGGGSGGGGSGGEIVLTQSPATLSLSPGERATLSCRA | |
| SQSVSNDLAWYQQKPGQAPRLLIYYASNRYTGVPDRFSGSGSGTDFTLTISSLEPE | |
| DFAVYYCQQDYSSPPWTFGQGTKVEIK (SEQ ID NO: 175) | |
| scFv (humanized): | scFv (humanized) |
| QVQLVESGGGVVQPGRSLRLSCAVSGFSLTSYGMHWVRQAPGKGLEWVAVIW | SEQ ID NO: 178 |
| SGGSTDYNAAFISRFTISRDNSKNTLYLQMNSLRAEDTAVYYCARTFTTSTSAWFA | |
| YWGQGTLVTVSSGGGGSGGGGSGGGGSGGDIQMTQSPSSLSASVGDRVTITCQ | |
| ASQSVSNDLNWYQQKPGKAPKLLIYYASNRYTGVPDRFSGSGSGTDFTFTISSLQP | |
| EDIATYYCQQDYSSPPWTFGGGTKVEIK (SEQ ID NO: 177) | |

[0123] In some embodiments, the activator ligand is pan-HLA ligand, and the activator ligand binding domain comprises a pan-HLA ligand binding domain. In some embodiments, the pan-HLA ligand binding domain comprises an scFv domain. In some embodiments, the pan-HLA ligand binding domain comprises a sequence of SEQ ID NO: 167, SEQ ID NO: 169, SEQ ID NO: 171, SEQ ID NO: 173, SEQ ID NO: 175, or SEQ ID NO: 177. In some embodiments, the pan-HLA ligand binding domain comprises a sequence at least 90%, at least 9500 or at least 9900 identical to SEQ ID NO: 167, SEQ ID NO: 169, SEQ ID NO: 171, SEQ ID NO: 173, SEQ ID NO: 175, or SEQ ID NO: 177. In some embodiments, the pan-HLA ligand binding domain is encoded by a sequence comprising SEQ ID NO: 168, SEQ ID NO: 170, SEQ ID NO: 172, SEQ ID NO: 174, SEQ ID NO: 176, or SEQ ID NO: 178. In some embodiments, the pan-HLA ligand binding domain is encoded by a sequence having at least 80% identity, at least 85% identity, at least 90% identity, at least 95% identity or at least 99% identity to a sequence of SEQ ID NO: 168, SEQ ID NO: 170, SEQ ID NO: 172, SEQ ID NO: 174, SEQ ID NO: 176, or SEQ ID NO: 178.

[0124] In some embodiments, the activator ligand is CD19 molecule (CD19) or a peptide antigen thereof, and the activator ligand binding domain comprises a CD19 ligand binding domain. In some embodiments, the CD19 ligand binding domain comprises an scFv domain. In some embodiments, the CD19 ligand binding domain comprises a sequence at least 90%, at least 95% or at least 99% identical to SEQ ID NO: 275 or SEQ ID NO: 277. In some embodiments, the CD-19 ligand binding domain comprises a sequence of SEQ ID NO: 275 or SEQ ID NO: 277. In some embodiments, the CD19 ligand binding domain is encoded by a sequence comprising SEQ ID NO: 276, or SEQ ID NO: 278. In some embodiments, the CD19 ligand binding domain is encoded by a sequence having at least 80% identity, at least 85% identity, at least 90% identity, at least 95% identity or at least 99% identity to a sequence of SEQ ID NO: 276 or SEQ ID NO: 278.

[0125] In some embodiments, activator ligand is CD19 molecule (CD19) or a peptide antigen thereof, and the activator receptor is a CAR. In some embodiments, the CD19 CAR comprises a sequence at least 90%, at least 95% or at least 99% identical to SEQ ID NO: 279 or SEQ ID NO: 281. In some embodiments, the CD19 CAR comprises or consists essentially of SEQ ID NO: 279 or SEQ ID NO: 281. In some embodiments, the CD19 CAR is encoded by a sequence having at least 80% identity, at least 85% identity, at least 90% identity, at least 95% identity or at least 99% identity to a sequence of SEQ ID NO: 280 or SEQ ID NO: 390. In some embodiments, the CD19 CAR is encoded by a sequence comprising or consisting essentially of SEQ ID NO: 280 or SEQ ID NO: 390. It will be appreciated by the person of ordinary skill that first, activator ligand binding domains for the first receptor may be isolated or derived from any source known in the art, including, but not limited to, art recognized T cell receptors, chimeric antigen receptors and antibody binding domains. For example, the first ligand binding domain may be derived from any of the antibodies disclosed in Table 9, and bind to a first ligand selected from the antigens described in Table 9. Accordingly, the immune cells comprising the two receptor system described can be used to treat any of the diseases or disorders described in Table 9. Selection of an appropriate first, activator receptor ligand binding domain to treat any the cancers described herein will be apparent to those of skill in the art. Table 9. Exemplary Antibodies

| Antigen | Antibody | Exemplary Diseases and Disorders |
|---|---|---|
| TNF receptor superfamily | Urelumab, Utomilumab | cancer, diffuse large B-cell lymphoma |
| member 9 (4-1BB, CD137) | | |
| 5′-nucleotidase | Oleclumab | pancreatic and colorectal cancer |
| trophoblast glycoprotein | Naptumomab | non-small cell lung carcinoma, renal |
| (5T4) | | cell carcinoma |
| activin receptor-like | Ascrinvacumab | cancer |
| kinase 1 | | |
| alpha-fetoprotein | Tacatuzumab | cancer |
| angiopoietin 2 | Nesvacumab, Vanucizumab | cancer |
| TNF superfamily member | Belimumab, Tabalumab, | cancers and autoimmune disorders |
| 13b (BAFF) | Tibulizumab | |
| TNF receptor superfamily | Belantamab | multiple myeloma |
| member 17 (BCMA) | | |
| mucin 16, cell surface | Igovomab, Oregovomab, | ovarian cancer |
| associated (CA-125) | Sofituzumab | |
| C-C motif chemokine | Mogamulizumab | adult T-cell leukemia/lymphoma |
| receptor 4 (CCR4) | | |
| interleukin 3 receptor | Talacotuzumab | leukemia |
| subunit alpha (CD123) | | |
| TNF receptor superfamily | Tavolimab, Vonlerolizumab | cancer |
| member 4 (CD134) | | |
| cytotoxic T-lymphocyte | Ipilimumab | melanoma |
| associated protein 4 | | |
| (CD152) | | |
| CD19 molecule (CD19) | Duvortuxizumab, Blinatumomab, | cancer |
| | Coltuximab, Denintuzumab, | |
| | Inebilizumab, Loncastuximab, | |
| | Taplitumomab | |
| membrane spanning 4- | Ibritumomab, Obinutuzumab, | cancers, multiple sclerosis, |
| domains A1 (CD20) | Ocaratuzumab, Ocrelizumab, | autoimmune disorders |
| | Ofatumumab, Rituximab, | |
| | Tositumomab, Veltuzumab | |
| CD200 molecule (CD200) | Samalizumab | cancer |
| CD22 molecule (CD22) | Bectumomab, Epratuzumab, | cancer |
| | Inotuzumab, Moxetumomab, | |
| | Pinatuzumab | |
| Fc fragment of IgE | Gomiliximab, Lumiliximab | chronic lymphocytic leukemia |
| receptor II (CD23, IgE | | |
| receptor) | | |
| interleukin 2 receptor | Camidanlumab, Basiliximab, | leukemias and lymphomas |
| subunit alpha (CD25) | Inolimomab, Daclizumab | |
| CD27 molecule (CD27) | Varlilumab | solid tumors and hematologic |
| | | malignancies |
| CD276 molecule (CD276) | Enoblituzumab, Omburtamab | cancer |
| TNF receptor superfamily | Brentuximab, Iratumumab | Hodgkin's lymphoma |
| member 8 (CD30, | | |
| TNFRSF8) | | |
| CD33 molecule (CD33) | Gemtuzumab, Lintuzumab, | acute myelogenous leukemia |
| | Vadastuximab | |
| CD37 molecule (CD37) | Lilotomab, Otlertuzumab, | cancer |
| | Tetulomab | |
| CD38 molecule (CD38) | Daratumumab, Isatuximab | multiple myeloma |
| CD44 molecule v6 (CD44 | Bivatuzumab | squamous cell carcinoma |
| v6) | | |
| integrin subunit alpha V | Abituzumab, Intetumumab | cancer |
| (CD51) | | |
| neural cell adhesion | Lorvotuzumab | cancer |
| molecule 1 (CD56) | | |
| CD6 molecule (CD6) | Itolizumab | psoriasis |
| CD70 molecule (CD70) | Cusatuzumab, Vorsetuzumab | cancer |
| CD74 molecule (CD74) | Milatuzumab | hematological malignancies |
| CD79B molecule (CD79B) | Polatuzumab, Iladatuzumab | Hematological cancers |
| CD80 molecule (CD80) | Galiximab | B-cell lymphoma |
| CEA cell adhesion | Altumomab, Arcitumomab, | cancer, colorectal cancer |
| molecule 5 (CEA) | Labetuzumab, Cibisatamab | |
| Claudin 18 Isoform 2 | Zolbetuximab | gastric cancer |
| Colony stimulating factor | Lacnotuzumab | cancer |
| 1 (CSF1) | | |
| colony stimulating factor 1 | Cabiralizumab, Emactuzumab | cancer |
| receptor (CSF1R) | | |
| Colony stimulating factor | Gimsilumab, Lenzilumab, | leukemias |
| 2 (CSF2) | Otilimab, Mavrilimumab | |
| cytotoxic T-lymphocyte | Tremelimumab | non-small cell lung, head & neck, |
| associated protein 4 | | urothelial cancer |
| (CTLA-4) | | |
| CXCR4 (CD184) | Ulocuplumab | hematologic malignancies |
| dendritic cell-associated | Tepoditamab | cancer |
| lectin 2 | | |
| delta like canonical Notch | Rovalpituzumab | small cell lung cancer |
| ligand 3 (DLL3) | | |
| delta like canonical Notch | Demcizumab | cancer |
| ligand 4 (DLL4) | | |
| TNF receptor superfamily | Drozitumab | cancer |
| member 10b (DR5) | | |
| EGF like domain multiple 7 | Parsatuzumab | cancer |
| (EGFL7) | | |
| epidermal growth factor | Cetuximab, Depatuxizumab, | cancer |
| receptor (EGFR) | Futuximab, Imgatuzumab, | |
| | Laprituximab, Matuzumab, | |
| | Necitumumab, Nimotuzumab, | |
| | Panitumumab, Zalutumumab, | |
| | Modotuximab, Amivantamab, | |
| | Tomuzotuximab, Losatuxizumab | |
| epithelial cell adhesion | Adecatumumab, Citatuzumab, | cancer |
| molecule (EpCAM) | Edrecolomab, Oportuzumab, | |
| | Solitomab, Tucotuzumab, | |
| | Catumaxomab | |
| EPH receptor A3 (EPHA3) | Ifabotuzumab | glioblastoma multiforme |
| erb-b2 receptor tyrosine | Duligotuzumab, Elgemtumab, | cancer |
| kinase 3 (ERBB3, HER3) | Lumretuzumab, Patritumab, | |
| | Seribantumab, Zenocutuzumab | |
| fibroblast growth factor | Aprutumab, Bemarituzumab | cancer |
| receptor (FGFR2) | | |
| Frizzled receptor | Vantictumab | cancer |
| GD2 ganglioside | Dinutuximab | neuroblastoma |
| GD3 ganglioside | Ecromeximab | malignant melanoma |
| GD3 ganglioside | Mitumomab | small cell lung carcinoma |
| glypican 3 | Codrituzumab | cancer |
| glycoprotein nmb | Glembatumumab | melanoma, breast cancer |
| (GPNMB) | | |
| epidermal growth factor | Zatuximab | cancer |
| receptor (HER1) | | |
| erb-b2 receptor tyrosine | Ertumaxomab, Margetuximab, | cancer, breast cancer |
| kinase 2 (HER2) | Timigutuzumab, Gancotamab, | |
| | Pertuzumab, Trastuzumab | |
| hepatocyte growth factor | Ficlatuzumab, Rilotumumab | cancer |
| (HGF) | | |
| MET proto-oncogene, | Telisotuzumab, Emibetuzumab | cancer |
| receptor tyrosine kinase | | |
| (HGFR) | | |
| IGF-1 receptor (CD221) | Cixutumumab, Dalotuzumab, | cancer |
| | Figitumumab, Ganitumab, | |
| | Robatumumab, Teprotumumab | |
| Interleukin 3 receptor | Flotetuzumab | hematological malignancies |
| Interleukin 1 alpha (IL1A) | Bermekimab | colorectal cancer |
| Interleukin 2 (IL2) | Cergutuzumab | cancer |
| integrin α5β1 | Volociximab | solid tumors |
| integrin αᵥβ₃ | Etaracizumab | melanoma, prostate cancer, ovarian |
| | | cancer |
| lymphocyte activating 3 | Relatlimab | melanoma |
| (LAG3) | | |
| C-C motif chemokine | Carlumab | cancer |
| ligand 2 (MCP-1) | | |
| mesothelin | Amatuximab | cancer |
| Mucin 1 | Clivatuzumab, Gatipotuzumab, | cancer |
| | Pemtumomab, Cantuzumab, | |
| | Pankomab | |
| NGNA ganglioside | Racotumomab | non-small cell lung cancer |
| Notch 1 | Brontictuzumab | cancer |
| Notch receptor | Tarextumab | cancer |
| neuropilin 1 (NRP1) | Vesencumab | cancer |
| programmed cell death 1 | Camrelizumab, Cetrelimab, | cancer |
| (PD-1) | Nivolumab, Pembrolizumab, | |
| | Pidilizumab, Cemiplimab, | |
| | Spartalizumab | |
| CD274 molecule (PD-L1) | Atezolizumab, Avelumab, | cancer |
| | Durvalumab | |
| receptor tyrosine kinase | Cirmtuzumab | leukemia |
| like orphan receptor 1 | | |
| (ROR1) | | |
| tenascin C | Tenatumomab | cancer |
| transforming growth | Fresolimumab | cancer |
| factor beta 1 (TGF-β) | | |
| VEGF-A | Brolucizumab, Bevacizumab, | cancer |
| | Ranibizumab, Varisacumab, | |
| | Faricimab | |
| VEGFR-1 | Icrucumab | cancer |
| VEGFR2 | Alacizumab, Ramucirumab | cancer |

### Inhibitors

[0126] The disclosure provides a second ligand, an inhibitor, and a second engineered receptor comprising a second ligand binding domain that binds to the inhibitor ligand.

[0127] The disclosure provides a second engineered receptor comprising an extracellular region, the extracellular region comprising a second ligand binding domain capable of specifically binding to a second ligand that inhibits activation of effector cells expressing the first and second receptors, wherein the effector cells are activated by binding of the first ligand to the first engineered receptor.

[0128] As used herein an “inhibitor” or “inhibitor ligand,” sometimes called a “blocker,” refers to a second ligand that binds to a second, ligand binding domain (inhibitor LBD) of an engineered receptor of the disclosure, but inhibits activation of an immune cell expressing the engineered receptor. The inhibitor is not expressed by the target cells. The inhibitor ligand is also expressed in a plurality of normal, non-target cells, including normal, non-target cells that express the activator ligand, thereby protecting these cells from the cytotoxic effects of the adoptive cell therapy. Without wishing to be bound by theory, inhibitor ligands can block activation of the effector cells through a variety of mechanisms. For example, binding of the inhibitor ligand to the inhibitor LBD can block transmission of a signal that occurs upon binding of the activator ligand to the activator LBD that would, in the absence of the inhibitor, lead to activation of the immune cell expressing the engineered receptors described herein.

[0129] Alternatively, or in addition, binding of the inhibitor ligand to the second engineered receptor can cause loss of cell surface expression the first, activator receptor from the surface of the immune cells comprising the two receptor system described herein. Without wishing to be bound by theory, it is thought that immune cell engagement of activator and inhibitor ligands on normal cells causes the inhibitor receptor to cause removal of nearby activator receptor molecules from the immune cell surface. This process locally desensitizes the immune cell, reversibly raising its activation threshold. Immune cells that engage only the activator ligand on a target cell cause local activation signals which are unimpeded by signals from the second, inhibitory receptor. This local activation increases until release of cytotoxic granules leads to target cell selective cell death. However, modulation of surface receptor expression levels may not be the only mechanism by which blocker receptors inhibit activation of immune cells by the first activator receptor. Without wishing to be bound by theory, other mechanisms may come into play, including, but not limited to, cross-talk between activator and blocker receptor signaling pathways.

[0130] In some embodiments, the second ligand is not expressed by the target cells, and is expressed by the non-target cells. In some embodiments, the target cells are cancer cells and the non-target cells are non-cancerous cells.

[0131] In some embodiments, the second, inhibitor ligand binding domain comprises an scFv domain.

[0132] In some embodiments, the second, inhibitor ligand binding domain comprises a Vβ-only ligand binding domain.

[0133] In some embodiments, the second, inhibitor ligand binding domain comprises an antigen binding domain isolated or derived from a T cell receptor (TCR). For example, the second, inhibitor ligand binding domain comprises TCR α and β chain variable domains.

### Inhibitor Targets

[0134] In some embodiments, the inhibitor ligand comprises a gene with high, homogeneous surface expression across tissues, or a peptide antigen thereof. Without wishing to be bound by theory, high, homogeneous surface expression across tissues allows the inhibitor ligand to deliver a large, even inhibitory signal. Alternatively, or in addition, expression of activator and inhibitor targets may be correlated, i.e. the two are expressed at similar levels on non-target cells.

[0135] In some embodiments, the second, inhibitor ligand is a peptide ligand. In some embodiments, the second, inhibitor ligand is a peptide antigen complexed with a major histocompatibility (MHC) class I complex (peptide MHC, or pMHC). Inhibitor ligands comprising peptide antigens complexed with pMHC comprising any of HLA-A, HLA-B or HLA-C are envisaged as within the scope of the disclosure.

[0136] In some embodiment, the inhibitor ligand is encoded by a gene that is absent or polymorphic in many tumors.

[0137] Methods of distinguishing the differential expression of inhibitor ligands between target and non-target cells will be readily apparent to the person or ordinary skill in the art. For example, the presence or absence of inhibitor ligands in non-target and target cells can be assayed by immunohistochemistry with an antibody that binds to the inhibitor ligand, followed by microscopy or FACS, RNA expression profiling of target cells and non-target cells, or DNA sequencing of non-target and target cells to determine if the genomic locus of the inhibitor ligand comprises mutations in either the target or non-target cells.

### Alleles Lost Due to Loss of Heterozygosity (LOH)

[0138] Homozygous deletions in primary tumors are rare and small, and therefore unlikely to yield target B candidates. For example, in an analysis of 2218 primary tumors across 21 human cancer types, the top four candidates were cyclin dependent kinase inhibitor 2A (CDKN2A), RB transcriptional corepressor 1 (RB1), phosphatase and tensin homolog (PTEN) and N3PB2. However, CDKN2A (P16) was deleted in only 5% homozygous deletion across all cancers. Homozygous HLA-A deletions were found in less than 0.2% of cancers (Cheng et al., Nature Comm. 8:1221 (2017)). In contrast, deletion of a single copy of a gene in cancer cells due to loss of hemizygosity occurs far more frequently.

[0139] In some embodiments, the second, inhibitor ligand comprises an allele of a gene that is lost in target cells due to loss of heterozygosity. In some embodiments, the target cells comprises cancer cells. Cancer cells undergo frequent genome rearrangements, including duplication and deletions. These deletions can lead to the deletion of one copy of one or more genes in the cancer cells.

[0140] As used herein, “loss of heterozygosity (LOH)” refers to a genetic change that occurs at high frequency in cancers, whereby one of the two alleles is deleted, leaving a single mono-allelic (hemizygous) locus.

### HLA Class I Alleles

[0141] In some embodiments, the second, inhibitor ligand comprises an HLA class I allele. The major histocompatibility complex (MHC) class I is a protein complex that displays antigens to cells of the immune system, triggering immune response. The Human Leukocyte Antigens (HLAs) corresponding to MHC class I are HLA-A, HLA-B and HLA-C.

[0142] In some embodiments, the second, inhibitor ligand comprises an HLA class I allele. In some embodiments, the second, inhibitor ligand comprises an allele of HLA class I that is lost in a target cell through LOH. HLA-A is a group of human leukocyte antigens (HLA) of the major histocompatibility complex (MHC) that are encoded by the HLA-A locus. HLA-A is one of three major types of human MHC class I cell surface receptors. The receptor is a heterodimer comprising a heavy a chain and smaller β chain. The α chain is encoded by a variant of HLA-A, while the R chain (β2-microglobulin) is invariant. There are several thousand HLA-A variants, all of which fall within the scope of the instant disclosure.

[0143] In some embodiments, the second, inhibitor ligand comprises an HLA-B allele. The HLA-B gene has many possible variations (alleles). Hundreds of versions (alleles) of the HLA-B gene are known, each of which is given a particular number (such as HLA-B27).

[0144] In some embodiments, the second, inhibitor ligand comprises an HLA-C allele. HLA-C belongs to the HLA class I heavy chain paralogues. This class I molecule is a heterodimer consisting of a heavy chain and a light chain (beta-2 microglobulin). Over one hundred HLA-C alleles have been described.

[0145] In some embodiments, the HLA class I allele has broad or ubiquitous RNA expression.

[0146] In some embodiments, the HLA class I allele has a known, or generally high minor allele frequency.

[0147] In some embodiments, the HLA class I allele does not require a peptide-MHC antigen, for example when the LA class I allele is recognized by a pan-LA ligand binding domain.

[0148] In some embodiments, the second inhibitor ligand comprises an HLA-A allele. In some embodiments the HLA-A allele comprises HLA-A*02. Various single variable domains known in the art or disclosed herein that bind to and recognize HLA-A*02 are suitable for use in embodiments. Such scFvs include, for example and without limitation, the following mouse and humanized scFv antibodies that bind HLA-A*02 in a peptide-independent way shown in Table 10 below (complementarity determining regions underlined):

TABLE 10
HLA-A*02 scFv binding domains
HLA-A*02 antigen binding domains

| | |
|---|---|
| scFv (mouse): | scFv (mouse) |
| DVLMTQTPLSLPVSLGDQASISCRSSQSIVHSNGNTYLEWYLQKPGQSPKLLIYKVS | DNA Sequence: |
| NRFSGVPDRFSGSGSGTDFTLKISRVEAEDLGVYYCFQGSHVPRTSGGGTKLEIKGG | SEQ ID NO: 179 |
| GGSGGGGSGGGGSGGQVQLQQSGPELVKPGASVRISCKASGYTFTSYHIHWVKQ | |
| RPGQGLEWIGWIYPGNVNTEYNEKFKGKATLTADKSSSTAYMHLSSLTSEDSAVYF | |
| CAREEITYAMDYWGQGTSVTVSS (SEQ ID NO: 53) | |
| scFv (humanized): | scFv |
| QVQLVQSGAEVKKPGSSVKVSCKASGYTFTSYHIHWVRQAPGQGLEWMGWIYP | (humanized) |
| GNVNTEYNEKFKGKATITADKSTSTAYMELSSLRSEDTAVYYCAREEITYAMDYWG | DNA Sequence: |
| QGTTVTVSSGGGGSGGGGSGGGGSGGEIVLTQSPGTLSLSPGERATLSCRSSQSIV | SEQ ID NO: 180 |
| HSNGNTYLEWYQQKPGQAPRLLIYKVSNRFSGIPDRFSGSGSGTDFTLTISRLEPED | |
| FAVYYCFQGSHVPRTFGGGTKVEIK (SEQ ID NO: 54) | |
| scFv (humanized): | scFv |
| QVQLVQSGAEVKKPGSSVKVSCKASGYTFTSYHIHWVRQAPGQGLEWMGWIYP | (humanized) |
| GNVNTEYNEKFKGKATITADKSTSTAYMELSSLRSEDTAVYYCAREEITYAMDYWG | DNA Sequence: |
| QGTTVTVSSGGGGSGGGGSGGGGSGGDIVMTQTPLSLPVTPGEPASISCRSSQSIV | SEQ ID NO: 181 |
| HSNGNTYLEWYLQKPGQSPQLLIYKVSNRFSGVPDRFSGSGSGTDFTLKISRVEAED | |
| VGVYYCFQGSHVPRTFGGGTKVEIK | |
| (SEQ ID NO: 55) | |
| scFv (humanized): | scFv |
| EVQLVESGGGLVKPGGSLRLSCAASGYTFTSYHIHWVRQAPGKGLEWVGWIYPG | (humanized) |
| NVNTEYNEKFKGRFTISRDDSKNTLYLQMNSLKTEDTAVYYCAREEITYAMDYWG | DNA Sequence: |
| QGTTVTVSSGGGGSGGGGSGGGGSGGDIQMTQSPSSLSASVGDRVTITCRSSQSI | SEQ ID NO: 182 |
| VHSNGNTYLEWYQQKPGKAPKLLIYKVSNRFSGVPSRFSGSGSGTDFTLTISSLQPE | |
| DFATYYCFQGSHVPRTFGGGTKVEIK | |
| (SEQ ID NO: 56) | |
| scFv (humanized): | scFv |
| QVQLVQSGAEVKKPGSSVKVSCKASGYTFTSYHIHWVRQAPGQGLEWIGWIYPG | (humanized) |
| NVNTEYNEKFKGKATITADESTNTAYMELSSLRSEDTAVYYCAREEITYAMDYWGQ | DNA Sequence: |
| GTLVTVSSGGGGSGGGGSGGGGSGGDIQMTQSPSTLSASVGDRVTITCRSSQSIV | SEQ ID NO: 183 |
| HSNGNTYLEWYQQKPGKAPKLLIYKVSNRFSGVPARFSGSGSGTEFTLTISSLQPDD | |
| FATYYCFQGSHVPRTFGQGTKVEVK (SEQ ID NO: 57) | |
| scFv (humanized): | scFv |
| QVQLVQSGAEVKKPGSSVKVSCKASGYTFTSYHMHWVRQAPGQGLEWIGYIYPG | (humanized) |
| NVNTEYNEKFKGKATLTADKSTNTAYMELSSLRSEDTAVYFCAREEITYAMDYWG | DNA Sequence: |
| QGTLVTVSSGGGGSGGGGSGGGGSGGDVQMTQSPSTLSASVGDRVTITCSSSQSI | SEQ ID NO: 184 |
| VHSNGNTYMEWYQQKPGKAPKLLIYKVSNRFSGVPDRFSGSGSGTEFTLTISSLQP | |
| DDFATYYCHQGSHVPRTFGQGTKVEVK (SEQ ID NO: 58) | |
| scFv (mouse): | scFv (mouse) |
| QVQLQQSGPELVKPGASVKMSCKASGYTFTSYHIQWVKQRPGQGLEWIGWIYPG | DNA Sequence: |
| DGSTQYNEKFKGKTTLTADKSSSTAYMLLSSLTSEDSAIYFCAREGTYYAMDYWGQ | SEQ ID NO: 185 |
| GTSVTVSSGGGGSGGGGSGGGGSGGDVLMTQTPLSLPVSLGDQVSISCRSSQSIV | |
| HSNGNTYLEWYLQKPGQSPKLLIYKVSNRFSGVPDRFSGSGSGTDFTLKISRVEAED | |
| LGVYYCFQGSHVPRTFGGGTKLEIK (SEQ ID NO: 59) | |
| scFv (humanized): | scFv |
| QLQLQESGPGLVKPSETLSLTCTVSGYTFTSYHIQWIRQPPGKGLEWIGWIYPGDG | (humanized) |
| STQYNEKFKGRATISVDTSKNQFSLNLDSVSAADTAIYYCAREGTYYAMDYWGKGS | DNA Sequence: |
| TVTVSSGGGGSGGGGSGGGGSGGDIQMTQSPSSLSASVGDRVTITCRSSQSIVHS | SEQ ID NO: 186 |
| NGNTYLEWYQQKPGKAPKLLIYKVSNRFSGVPSRFSGSGSGTDFTFTISSLQPEDIA | |
| TYYCFQGSHVPRTFGPGTKVDIK (SEQ ID NO: 60) | |
| scFv (humanized): | scFv |
| EVQLVQSGAELKKPGSSVKVSCKASGYTFTSYHIQWVKQAPGQGLEWIGWIYPGD | (humanized) |
| GSTQYNEKFKGKATLTVDKSTNTAYMELSSLRSEDTAVYYCAREGTYYAMDYWGQ | DNA Sequence: |
| GTLVTVSSGGGGSGGGGSGGGGSGGDIQMTQSPSTLSASVGDRVTITCRSSQSIV | SEQ ID NO: 187 |
| HSNGNTYLEWYQQKPGKAPKLLIYKVSNRFSGVPSRFSGSGSGTDFTLTISSLQPDD | |
| FATYYCFQGSHVPRTFGQGTKVEVK (SEQ ID NO: 61) | |
| scFv (humanized): | scFv |
| QVQLVQSGAEVKKPGSSVKVSCKASGYTFTSYHIQWVRQAPGQGLEWMGWIYP | (humanized) |
| GDGSTQYNEKFKGRVTITADKSTSTAYMELSSLRSEDTAVYYCAREGTYYAMDYW | DNA Sequence: |
| GQGTTVTVSSGGGGSGGGGSGGGGSGGEIVLTQSPGTLSLSPGERATLSCRSSQSI | SEQ ID NO: 188 |
| VHSNGNTYLEWYQQKPGQAPRLLIYKVSNRFSGIPDRFSGSGSGTDFTLTISRLEPE | |
| DFAVYYCFQGSHVPRTFGGGTKVEIK (SEQ ID NO: 62) | |
| scFv (humanized): | scFv |
| QVTLKQSGAEVKKPGSSVKVSCTASGYTFTSYHVSWVRQAPGQGLEWLGRIYPGD | (humanized) |
| GSTQYNEKFKGKVTITADKSMDTSFMELTSLTSEDTAVYYCAREGTYYAMDLWGQ | DNA Sequence: |
| GTLVTVSSGGGGSGGGGSGGGGSGGEIVLTQSPGTLSLSPGERATLSCRSSQSIVHS | SEQ ID NO: 189 |
| NGNTYLAWYQQKPGQAPRLLISKVSNRFSGVPDRFSGSGSGTDFTLTISRLEPEDFA | |
| VYYCQQGSHVPRTFGGGTKVEIK (SEQ ID NO: 63) | |
| scFv (humanized): | scFv |
| QVQLVQSGAEVKKPGASVKVSCKASGYTFTSYHMHWVRQAPGQRLEWMGWIY | (humanized) |
| PGDGSTQYNEKFKGKVTITRDTSASTAYMELSSLRSEDTAVYYCAREGTYYAMDY | DNA Sequence: |
| WGQGTLVTVSSGGGGSGGGGSGGGGSGGDIVMTQTPLSLPVTPGEPASISCRSS | SEQ ID NO: 190 |
| QSIVHSNGNTYLDWYLQKPGQSPQLLIYKVSNRFSGVPDRFSGSGSGTDFTLKISRV | |
| EAEDVGVYYCMQGSHVPRTFGGGTKVEIK (SEQ ID NO: 64) | |

[0149] Exemplary heavy chain and light chain CDRs (CDR-H1, CDR-H2 and CDR-H3, or CDR-L1, CDR-L2 and CDR-L3, respectively) for HLA-A*02 ligand binding domains are shown in Table 11 below.

TABLE 11
CDRs corresponding to HLA-A*02 antigen binding domains

| CDR-L1 | CDR-L2 | CDR-L3 | CDR-H1 | CDR-H2 | CDR-H3 |
|---|---|---|---|---|---|
| RSSQSIVHSN | KVSNRFSGVP | FQGSHVPRT | ASGYTFTSYHI | WIYPGNVNT | EEITYAMDY |
| GNTYLE (SEQ | DR (SEQ ID | (SEQ ID NO: | H (SEQ ID NO: | EYNEKFKGK | (SEQ ID NO: |
| ID NO: 41) | NO: 42) | 43) | 44) | (SEQ ID NO: | 46) |
| | | | | 45) | |
| RSSQSIVHSN | KVSNRFSGVP | MQGSHVPRT | SGYTFTSYHM | WIYPGDGST | EGTYYAMDY |
| GNTYLD (SEQ | DR (SEQ ID | (SEQ ID NO: | H (SEQ ID NO: | QYNEKFKG | (SEQ ID NO: |
| ID NO: 47) | NO: 48) | 49) | 50) | (SEQ ID NO: | 52) |
| | | | | 51) | |

[0150] In some embodiments, the scFv comprises the complementarity determined regions (CDRs) of any one of SEQ ID NOS: 41-52. In some embodiments, the scFv comprises a sequence at least 95% identical to any one of SEQ ID NOS: 41-52. In some embodiments, the scFv comprises a sequence identical to any one of SEQ ID NOS: 41-52. In some embodiments, the heavy chain of the antibody comprises the heavy chain CDRs of any one of SEQ ID NOS: 53-64, and wherein the light chain of the antibody comprises the light chain CDRs of any one of SEQ ID NOS: 53-64. In some embodiments, the heavy chain of the antibody comprises a sequence at least 95% identical to the heavy chain portion of any one of SEQ ID NOS: 53-64, and wherein the light chain of the antibody comprises a sequence at least 95% identical to the light chain portion of any one of SEQ ID NOS: 53-64.

[0151] In some embodiments, the heavy chain of the antibody comprises a sequence identical to the heavy chain portion of any one of SEQ ID NOS: 53-64, and wherein the light chain of the antibody comprises a sequence identical to the light chain portion of any one of SEQ ID NOS: 53-64.

[0152] In some embodiments, the scFv comprises a sequence at least 95% identical, at least 96% identical, at least 97% identical, at least 98% identical, at least 99% identical or identical to any one of SEQ ID NOS: 53-64.

[0153] In some embodiments, the second, inhibitory ligand is HLA-A*02, and the inhibitory ligand binding domain comprises an HLA-A*02 ligand binding domain. In some embodiments, the second ligand binding domain binds HLA-A*02 independent of the peptide in a pMHC complex comprising HLA-A*02. In some embodiments, the HLA-A*02 ligand binding domain comprises an scFv domain. In some embodiments, the HLA-A*02 ligand binding domain comprises a sequence of any one of SEQ ID NOs: 53-64. In some embodiments, the HLA-A*02 ligand binding domain comprises a sequence at least 90%, at least 95% or at least 99% identical to a sequence of any one of SEQ ID NOs: 53-64. In some embodiments, the HLA-A*02 ligand binding domain is encoded by a sequence comprising any one of SEQ ID NOs: 180-190. In some embodiments, the HLA-A*02 ligand binding domain is encoded by a sequence having at least 80% identity, at least 85% identity, at least 90% identity, at least 95% identity or at least 99% identity to a sequence of any one of SEQ ID NOs: 180-190.

### Minor Histocompatibility Antigens

[0154] In some embodiments, the second, inhibitor ligand comprises a minor histocompatibility antigen (MiHA). In some embodiments, the second, inhibitor ligand comprises an allele of a MiHA that is lost in a target cell through LOH.

[0155] MiHAs are peptides derived from proteins that contain nonsynonymous differences between alleles and are displayed by common HLA alleles. The non-synonymous differences can arise from SNPs, deletions, frameshift mutations or insertions in the coding sequence of the gene encoding the MiHA. Exemplary MiHAs can be about 9-12 amino acids in length and can bind to MHC class I and MHC class II proteins. Binding of the TCR to the MHC complex displaying the MiHA can activate T cells. The genetic and immunological properties of MiHAs will be known to the person of ordinary skill in the art. Candidate MiHAs are known peptides presented by known HLA class I alleles, are known to elicit T cell responses in the clinic (for example, in graft versus host disease, or transplant rejection, and allow for patient selection by simple SNP genotyping.

[0156] In some embodiments, the MiHA has broad or ubiquitous RNA expression.

[0157] In some embodiments, the MiHA has high minor allele frequency.

[0158] In some embodiments, the MiHA comprises a peptide derived from a Y chromosome gene.

[0159] In some embodiments, the second inhibitor ligand comprises a MiHA selected from the group of MiHAs disclosed in Tables 12 and 13.

[0160] Exemplary, but non-limiting, examples of MiHAs that are envisaged as within the scope of the instant invention are disclosed in Table 12 below. Columns in Table 12 indicate, from left to right, the name of the MiHA, the gene which from which it is derived, MHC class I variant which can display the MiHA and the sequences of the peptide variants [A/B variants indicated in brackets).

TABLE 12
HLA Class I Autosomal MiHAs

| MiHA | Gene | HLA | Peptide A/B |
|---|---|---|---|
| LB-CYBA-1Y | cytochrome b-245 alpha chain | A*01:01 | STMERWGQK[Y/H] (SEQ ID NO: |
| | (CYBA) | | 303) |
| LB-OAS1-1R | 2′-5′-oligoadenylate synthetase 1 | A*01:01 | ETDDPR[R/T]YQKY (SEQ ID NO: 304) |
| | (OAS1) | | |
| HA-1/A2 | Rho GTPase activating protein 45 | A*02:01 | VL[H/R]DDLLEA (SEQ ID NO: 8830) |
| | (HMHA1) | | |
| HA-2 | myosin IG (MYO1G) | A*02:01 | YIGEVLVS[V/M] (SEQ ID NO: 305) |
| HA-8 | pumilio RNA binding family | A*02:01 | [R/P]TLDKVLEV (SEQ ID NO: 306) |
| | member 3 (KIAA0020, PUM3) | | |
| HA-3 | A-kinase anchoring protein 13 | A*01:01 | V[T/M]EPGTAQY (SEQ ID NO: 307) |
| | (AKAP13) | | |
| HwA11-S | chromosome 19 open reading | A*02:01 | CIPPD[S/T]LLFPA (SEQ ID NO: 308) |
| | frame 48 (C19ORF48) | | |
| LB-ADIR-1F | torsin family 3 member A (TOR3A) | A*02:01 | SVAPALAL[F/S]PA (SEQ ID NO: 309) |
| LB-HIVEP1-1S | HIVEP zinc finger 1 (HIVEP1) | A*02:01 | SLPKH[S/N]VTI (SEQ ID NO: 310) |
| LB-NISCH-1A | nischarin (NISCH) | A*02:01 | ALAPAP[A/V]EV (SEQ ID NO: 311) |
| LB-SSR1-1S | signal sequence receptor subunit 1 | A*02:01 | [S/L]LAVAQDLT (SEQ ID NO: 312) |
| | (SSR1) | | |
| LB-WNK1-1I | WNK lysine deficient protein kinase | A*02:01 | RTLSPE[I/M]ITV (SEQ ID NO: 313) |
| | 1 (WNK1) | | |
| T4A | tripartite motif containing 4 | A*02:01 | GLYTYWSAG[A/E] (SEQ ID NO: 314) |
| | (TRIM42) | | |
| UTA2-1 | retroelement silencing factor 1 | A*02:01 | QL[L/P]NSVLTL (SEQ ID NO: 315) |
| | (KIAA1551) | | |
| LB-CLYBL-1Y | citramalyl-CoA lyase (CLYBL) | A*02:01 | SLAA(Y/D)IPRL (SEQ ID NO: 316) |
| TRIM22 | tripartite motif containing 22 | A*02:01 | MAVPPC[C/R]IGV (SEQ ID NO: 317) |
| | (TRIM22) | | |
| PARP10-1L | poly(ADP-ribose) polymerase | A*02:01 | GL[L/P]GQEGLVEI (SEQ ID NO: 318) |
| | family member 10 (PARP10) | | |
| FAM119A-1T | methyltransferase like 21A | A*02:01 | AMLERQF[T/I]V (SEQ ID NO: 319) |
| | (FAM119A) | | |
| GLRX3-1S | glutaredoxin 3 (GLRX3) | A*02:01 | FL[S/P]SANEHL (SEQ ID NO: 320) |
| HNF4G-1M | hepatocyte nuclear factor 4 gamma | A*02:01 | M[M/I]YKDILLL (SEQ ID NO: 321) |
| | (HNF4G) | | |
| HMMR-IV | hyaluronan mediated motility | A*02:01 | SLQEK[V/A]AKA (SEQ ID NO: 322) |
| | receptor (HMMR) | | |
| BCL2A1 | BCL2 related protein A1 (BCL2A1) | A*02:01 | VLQ[N/K]VAFSV (SEQ ID NO: 323) |
| CDC26-1F | cell division cycle 26 (CDC26) | A*02:01 | [F/S]VAGTQEVFV (SEQ ID NO: 324) |
| APOBEC3F- | apolipoprotein B mRNA editing | A*02:01 | FL[S/A]EHPNVTL (SEQ ID NO: 325) |
| 1S/A | enzyme catalytic subunit 3F | | |
| | (APOBEC3F) | | |
| LB-PRCP-1D | prolylcarboxypeptidase (PRCP) | A*02:01 | FMWDVAE[D/E]L (9mer) (SEQ ID |
| | | | NO: 326), FMWDVAE[D/E]LKA |
| | | | (11mer) (SEQ ID NO: 327) |
| LB-CCL4-1T | C-C motif chemokine ligand 4 | A*02:01 | CADPSE[T/S]WV (SEQ ID NO: 328) |
| | (CCL4) | | |
| LB-NCAPD3- | non-SMC condensin II complex | A*02:01 | WL[Q/R]GVVPVV (SEQ ID NO: 329) |
| 1Q | subunit D (NCAPD3) | | |
| LB-NDC80-1P | NDC80 kinetochore complex | A*02:01 | HLEEQI[P/A]KV (SEQ ID NO: 330) |
| | component (NDC80) | | |
| LB-TTK-1D | TTK protein kinase (TTK) | A*02:01 | RLH[D/E]GRVFV (SEQ ID NO: 331) |
| WDR27-1L | WD repeat domain 27 (WDR27) | A*02:01 | S[L/P]DDHVVAV (SEQ ID NO: 332) |
| MIIP | migration and invasion inhibitory | A*02:01 | SEESAVP[K/E]RSW (11mer) (SEQ ID |
| | protein (MIIP) | | NO: 333), EESAVP[K/E]RSW (10mer) |
| | | | (SEQ ID NO: 334) |
| HER-2/NEU | E erb-b2 receptor tyrosine kinase 2 | A*02:01 | not reported |
| | (RBB2) | | |
| LB-DHX33-1C | DEAH-box helicase 33 (DHX33) | A*02:01, | YLYEGGIS[C/R] (SEQ ID NO: 335) |
| | | C*03:03 | |
| PANE1 | centromere protein M (CENPM) | A*03:01 | RVWDLPGVLK (SEQ ID NO: 336) |
| SP110 | SP110 nuclear body protein (SP110) | A*03:01 | SLP[R/G]GTSTPK (SEQ ID NO: 337) |
| ACC-1C/Y | BCL2 related protein A1 (BCL2A1) | A*24:02 | DYLQ[Y/C]VLQI (SEQ ID NO: 338) |
| P2RX7 | purinergic receptor P2X 7 (P2RX7) | A*29:02 | WFHHC[H/R]PKY (SEQ ID NO: 339) |
| ACC-4 | cathepsin H (CTSH) | A*31:01 | ATLPLLCA[R/G] (SEQ ID NO: 340) |
| ACC-5 | CTSH | A*33:03 | WATLPLLCA[R/G] (SEQ ID NO: 341) |
| AKAP13 | A-kinase anchoring protein 13 | B*07:02 | APAGVREV[M/T] (SEQ ID NO: 342) |
| | (AKAP13) | | |
| LB- | apolipoprotein B mRNA editing | B*07:02, | [K/E]PQYHAEMCF (SEQ ID NO: 343) |
| APOBEC3B- | enzyme catalytic subunit 3B | B*08:01 | |
| 1K | (APOBEC3B) | | |
| APOBEC3H | apolipoprotein B mRNA editing | B*07:02 | KPQQ[K/E]GLRL (SEQ ID NO: 344) |
| | enzyme catalytic subunit 3H | | |
| | (APOBEC3H) | | |
| LB-ARHGDIB- | Rho GDP dissociation inhibitor beta | B*07:02 | LPRACW[R/P]EA (SEQ ID NO: 345) |
| 1R | (ARHGDIB) | | |
| LB-BCAT2-1R | BCAT2—branched chain amino | B*07:02 | QP[R/T]RALLFVIL (SEQ ID NO: 346) |
| | acid transaminase 2 (BCAT2) | | |
| BFAR | bifunctional apoptosis regulator | B*07:02 | APNTGRANQQ[M/R] (SEQ ID NO: |
| | (BFAR) | | 347) |
| C14orf169 | ribosomal oxygenase 1 (C14orf169 | B*07:02 | RPR[A/V]PTEELAL (SEQ ID NO: 348) |
| | or RIOX1) | | |
| LB-C16ORF- | C16ORF | B*07:02 | [R/W]PCPSVGLSFL (SEQ ID NO: 349) |
| 1R | | | |
| C18orf21 | chromosome 18 open reading | B*07:02 | NPATP[A/T]SKL (SEQ ID NO: 350) |
| | frame 21 (C18orf21) | | |
| LB-EBI3-1I | Epstein-Barr virus induced 3 (EBI3) | B*07:02 | RPRARYY[I/V]QV (SEQ ID NO: 351) |
| POP1 | POP1 homolog, ribonuclease | B*07:02 | LPQKKS[N/K]AL (SEQ ID NO: 352) |
| | P/MRP subunit (POP1) | | |
| SCRIB | scribble planar cell polarity protein | B*07:02 | LPQQPP[L/P]SL (SEQ ID NO: 353) |
| | (SCRIB) | | |
| MTRR | 5-methyltetrahydrofolate- | B*07:02 | SPAS[S/L]RTDL (SEQ ID NO: 354) |
| | homocysteine methyltransferase | | |
| | reductase (MTRR) | | |
| LLGL2 | LLGL scribble cell polarity complex | B*07:02 | SPSL[R/H]ILAI(SEQ ID NO: 355) |
| | component 2 (LLGL2) | | |
| LB-ECGF-1H | thymidine phosphorylase (TYMP) | B*07:02 | RP[H/R]AIRRPLAL (SEQ ID NO: 356) |
| LB-ERAP1-1R | endoplasmic reticulum | B*07:02 | HP[R/P]QEQIALLA (11mer) (SEQ ID |
| | aminopeptidase 1 (ERAP1) | | NO: 357), HP[R/P]QEQIAL (9mer) |
| | | | (SEQ ID NO: 358) |
| LB-FUCA2-1V | alpha-L-fucosidase 2 (FUCA2) | B*07:02 | RLRQ[V/M]GSWL (SEQ ID NO: 359) |
| LB-GEMIN4- | gem nuclear organelle associated | B*07:02, | FPALRFVE[V/E] (SEQ ID NO: 360) |
| 1V | protein 4 (GEMIN4) | B*08:01 | |
| HDGF | heparin binding growth factor | B*07:02 | LPMEVEKNST[L/P] (SEQ ID NO: 361) |
| | (HDGF) | | |
| LB-PDCD11- | programmed cell death 11 | B*07:02 | GPDSSKT[F/L]LCL (SEQ ID NO: 362) |
| 1F | (PDCD11) | | |
| LB-PFAS-1P | phosphoribosylformylglycinamidine | B*07:02 | A[P/S]GHTRRKL (SEQ ID NO: 363) |
| | synthase (PFAS) | | |
| LB-TEP1-1S | telomerase associated protein 1 | B*07:02 | APDGAKVA[S/P]L (SEQ ID NO: 364) |
| | (TEP1) | | |
| LB-TMEM8A- | post-glycosylphosphatidylinositol | B*07:02 | RPRSVT[I/V]QPLL (SEQ ID NO: 365) |
| 1I | attachment to proteins 6 (TMEM8A | | |
| | or PGAP6) | | |
| LB-USP15-1I | ubiquitin specific peptidase 15 | B*07:02 | MPSHLRN[I/T]LL (SEQ ID NO: 366) |
| | (USP15) | | |
| LRH-1 | purinergic receptor P2X 5 (P2RX5) | B*07:02 | TPNQRQNVC (SEQ ID NO: 367) |
| LB-MOB3A- | MOB kinase activator 3A (MOB3A) | B*07:02 | [C/S]PRPGTWTC (SEQ ID NO: 368) |
| 1C | | | |
| LB-ZDHHC6- | zinc finger DHHC-type | B*07:02 | RPR[Y/H]WILLVKI (SEQ ID NO: 369) |
| 1Y | palmitoyltransferase 6 (ZDHHC6) | | |
| ZAPHIR | zinc finger protein 419 (ZNF419) | B*07:02 | IPRDSWWVEL (SEQ ID NO: 370) |
| HEATR1 | HEAT repeat containing 1 (HEATR1) | B*08:01 | ISKERA[E/G]AL (SEQ ID NO: 371) |
| LB-GSTP1-1V | glutathione S-transferase pi 1 | B*08:01 | DLRCKY[V/I]SL (SEQ ID NO: 372) |
| | (GSTP1) | | |
| HA-1/B60 | Rho GTPase activating protein 45 | B*40:01 | KECVL[H/R]DDL (SEQ ID NO: 373) |
| | (HMHA1) | | |
| LB-SON-1R | SON DNA and RNA binding protein | B*40:01 | SETKQ[R/C]TVL (SEQ ID NO: 374) |
| | (SON) | | |
| LB-SWAP70- | switching B cell complex subunit | B*40:01 | MEQLE[Q/E]LEL (SEQ ID NO: 375) |
| 1Q | SWAP70 (SWAP70) | | |
| LB-TRIP10- | thyroid hormone receptor | B*40:01 | G[E/G][P/S]QDL[C/G]TL (SEQ ID NO: |
| 1EPC | interactor 10 (TRIP10) | | 376) |
| LB-NUP133- | nucleoporin 133 (NUP133) | B*40:01 | SEDLILC[R/Q]L (SEQ ID NO: 377) |
| 1R | | | |
| LB-ZNFX1-1Q | zinc finger NFXl-type containing 1 | B*40:01 | NEIEDVW[Q/H]LDL (SEQ ID NO: |
| | (ZNFX1) | | 378) |
| SLC1A5 | solute carrier family 1 member 5 | B*40:02 | AE[A/P]TANGGLAL (SEQ ID NO: 379) |
| | (SLC1A5) | | |
| ACC-2 | BCL2A1 | B*44:02, | KEFED[D/G]IINW (SEQ ID NO: 380) |
| | | B*44:03 | |
| ACC-6 | histocompatibility minor serpin | B*44:03 | MEIFIEVFSHF (SEQ ID NO: 381) |
| | domain containing (HMSD) | | |
| HB-1H/Y | histocompatibility minor HB-1 | B*44:03 | EEKRGSL[H/Y]VW (SEQ ID NO: 382) |
| | (HMHB1) | | |
| DPH1 | diphthamide biosynthesis 1 (DPH1) | B*57:01 | S[V/L]LPEVDVW (SEQ ID NO: 383) |
| UGT2B17/A02 | UDP glucuronosyltransferase family | A*02:06 | CVATMIFMI (SEQ ID NO: 384) |
| | 2 member B17 (UGT2B17) | | |
| UGT2B17/A29 | UGT2B17 | A*29:02 | AELLNIPFLY (SEQ ID NO: 385) |
| UGT2B17/B44 | UGT2B17 | B*44:03 | AELLNIPFLY (SEQ ID NO: 386) |

[0161] Exemplary, but non-limiting, examples of MiHAs that are envisaged as within the scope of the instant invention are disclosed in Table 13 below. Columns in Table 13 indicate, from left to right, the name of the MiHA, the gene which from which it is derived, MHC class I variant which can display the MiHA and the sequences of the peptide variants [A/B variants indicated in brackets).

TABLE 13
HLA Class I Y linked MiHAs

| MiHA | Gene | HLA | Peptide A/B |
|---|---|---|---|
| DFFRY | ubiquitin specific peptidase 9 Y- | A*01:01 | IVD[C/S]LTEMY (SEQ ID NO: 387) |
| | linked (DFFRY) | | |
| SMCY | lysine demethylase 5 (SMCY) | A*02:01 | FIDSYICQV (SEQ ID NO: 388) |
| TMSB4Y | thymosin beta 4 Y-linked (TMSB4Y) | A*33:03 | EVLLRPGLHFR (SEQ ID NO: 389) |
| SMCY | SMCY | B*07:02 | SP[S/A]VDKA[R/Q]AEL (SEQ ID NO: |
| | | | 34) |
| UTY | ubiquitously transcribed | B*08:01 | LPHN[H/R]T[D/N]L (SEQ ID NO: 25) |
| | tetratricopeptide repeat | | |
| | containing, Y-linked (UTY) | | |
| RPS4Y | ribosomal protein S4 Y-linked 1 | B*52:01 | TIRYPDP[V/L]I (SEQ ID NO: 24) |
| | (RPS4Y) | | |
| UTY | UTY | B*60:01 | [R/G]ESEE[E/A]S[V/P]SL (SEQ ID |
| | | | NO: 23) |

[0162] In some embodiments, the MiHA comprises HA-1. HA-1 is a peptide antigen having a sequence of VL[H/R]DDLLEA (SEQ ID NO: 8830), and is derived from the Rho GTPase activating protein 45 (HA-1) gene.

[0163] Exemplary ligand binding domains that selectively bind to HA-1 variant H peptide (VLHDDLLEA (SEQ ID NO: 191)) are shown in Table 14 below. TCR alpha and TCR beta sequences in SEQ ID NO: 193 are separated by a P2A self-cleaving polypeptide of sequence ATNFSLLKQAGDVEENPGP (SEQ ID NO: 192) with an N terminal GSG linker.

TABLE 14
Ftcr HA-1(H) Inhibitory Receptor Sequences

| HA-1H TCRalpha T48C P2A KP7 HA-1H TCRbeta S57C: | HA-1H |
|---|---|
| MVKIRQFLLAILWLQLSCVSAAKNEVEQSPQNLTAQEGEFITINCSYSVGISALHWLQQHP | TCRalpha |
| GGGIVSLFMLSSGKKKHGRLIATINIQEKHSSLHITASHPRDSAVYICAVRSVSGAGSYQLTF | T48C P2A |
| GKGTKLSVIPNIQNPDPAVYQLRDSKSSDKSVCLFTDFDSQTNVSQSKDSDVYITDKCVLD | KP7 HA-1H |
| MRSMDFKSNSAVAWSNKSDFACANAFNNSIIPEDTFFPSPESSCDVKLVEKSFETDTNLN | TCRbeta |
| FQNLSVIGFRILLLKVAGFNLLMTLRLWSSGSGATNFSLLKQAGDVEENPGPMGTSLLCW | S57C DNA |
| MALCLLGADHADTGVSQNPRHKITKRGQNVTFRCDPISEHNRLYWYRQTLGQGPEFLTY | Sequence: |
| FQNEAQLEKSRLLSDRFSAERPKGSFSTLEIQRTEQGDSAMYLCASSIDSFNEQFFGPGTRL | SEQ ID NO: |
| TVLEDLKNVFPPEVAVFEPSEAEISHTQKATLVCLATGFYPDHVELSWWVNGKEVHSGVC | 194 |
| TDPQPLKEQPALNDSRYCLSSRLRVSATFWQNPRNHFRCQVQFYGLSENDEWTQDRAK | |
| PVTQIVSAEAWGRADCGFTSESYQQGVLSATILYEILLGKATLYAVLVSALVLMAMVKRKD | |
| SRG (SEQ ID NO: 193) | |
| HA-1H TCRalpha: | HA-1H TCR |
| MVKIRQFLLAILWLQLSCVSAAKNEVEQSPQNLTAQEGEFITINCSYSVGISALHWLQQHP | alpha DNA |
| GGGIVSLFMLSSGKKKHGRLIATINIQEKHSSLHITASHPRDSAVYICAVRSVSGAGSYQLTF | Sequence: |
| GKGTKLSVIPNIQNPDPAVYQLRDSKSSDKSVCLFTDFDSQTNVSQSKDSDVYITDKCVLD | SEQ ID NO: |
| MRSMDFKSNSAVAWSNKSDFACANAFNNSIIPEDTFFPSPESSCDVKLVEKSFETDTNLN | 201 |
| FQNLS (SEQ ID: 199) | |
| HA-1(H) TCRbeta: | HA-1H |
| MGTSLLCWMALCLLGADHADTGVSQNPRHKITKRGQNVTFRCDPISEHNRLYWYRQTL | TCRbeta |
| GQGPEFLTYFQNEAQLEKSRLLSDRFSAERPKGSFSTLEIQRTEQGDSAMYLCASSIDSFNE | DNA |
| QFFGPGTRLTVLEDLKNVFPPEVAVFEPSEAEISHTQKATLVCLATGFYPDHVELSWWVN | Sequence: |
| GKEVHSGVCTDPQPLKEQPALNDSRYCLSSRLRVSATFWQNPRNHFRCQVQFYGLSEND | SEQ ID NO: |
| EWTQDRAKPVTQIVSAEAWGRADCGFTSESYQQGVLS (SEQ ID NO: 200) | 202 |
| HA-1H FTCRalpha LIR1 TICD: | HA-1H |
| MVKIRQFLLAILWLQLSCVSAAKNEVEQSPQNLTAQEGEFITINCSYSVGISALHWLQQHP | FTCRalpha |
| GGGIVSLFMLSSGKKKHGRLIATINIQEKHSSLHITASHPRDSAVYICAVRSVSGAGSYQLTF | LIR1 TICD |
| GKGTKLSVIPNIQNPDPAVYQLRDSKSSDKSVCLFTDFDSQTNVSQSKDSDVYITDKCVLD | DNA |
| MRSMDFKSNSAVAWSNKSDFACANAFNNSIIPEDTFFPSPESSCDVKLVEKSFETDTNLN | Sequence: |
| FQNLSVVIGILVAVILLLLLLLLLFLILRHRRQGKHWTSTQRKADFQHPAGAVGPEPTDRGL | SEQ ID NO: |
| QWRSSPAADAQEENLYAAVKHTQPEDGVEMDTRSPHDEDPQAVTYAEVKHSRPRREM | 196 |
| ASPPSPLSGEFLDTKDRQAEEDRQMDTEAAASEAPQDVTYAQLHSLTLRREATEPPPSQE | |
| GPSPAVPSIYATLAIH (SEQ ID NO: 195) | |
| HA-1H FTCRbeta LIR1 TICD: | HA-1H |
| MGTSLLCWMALCLLGADHADTGVSQNPRHKITKRGQNVTFRCDPISEHNRLYWYRQTL | FTCRbeta |
| GQGPEFLTYFQNEAQLEKSRLLSDRFSAERPKGSFSTLEIQRTEQGDSAMYLCASSIDSFNE | LIR1 TICD |
| QFFGPGTRLTVLEDLKNVFPPEVAVFEPSEAEISHTQKATLVCLATGFYPDHVELSWWVN | DNA |
| GKEVHSGVCTDPQPLKEQPALNDSRYCLSSRLRVSATFWQNPRNHFRCQVQFYGLSEND | Sequence: |
| EWTQDRAKPVTQIVSAEAWGRADCGFTSESYQQGVLSVVIGILVAVILLLLLLLLLFLILRHR | SEQ ID NO: |
| RQGKHWTSTQRKADFQHPAGAVGPEPTDRGLQWRSSPAADAQEENLYAAVKHTQPE | 198 |
| DGVEMDTRSPHDEDPQAVTYAEVKHSRPRREMASPPSPLSGEFLDTKDRQAEEDRQMD | |
| TEAAASEAPQDVTYAQLHSLTLRREATEPPPSQEGPSPAVPSIYATLAIH (SEQ ID NO: | |
| 197) | |

[0164] In some embodiments, the second, inhibitory ligand comprises HA-1(H). In some embodiments, the second, inhibitory ligand binding is isolated or derived from a TCR. In some embodiments, the second, inhibitory ligand binding domain comprises TCR alpha and TCR beta variable domains. In some embodiments, the TCR alpha and TCR beta variable domains are separated by a self-cleaving polypeptide sequence. In some embodiments, the TCR alpha and TCR beta variable domains separated by a self-cleaving polypeptide sequence comprise SEQ ID NO: 193. In some embodiments, the TCR alpha and TCR beta variable domains separated by a self-cleaving polypeptide sequence comprise SEQ ID NO: 193, or a sequence having at least 9000, at least 9500, or at least 9900 identity thereto. In some embodiments, the TCR alpha and TCR beta variable domains are encoded by a sequence of SEQ ID NO: 194, or a sequence having at least 800% identity, at least 9000, at least 9500, or at least 9900 identity thereto. In some embodiments, the TCR alpha variable domain comprises SEQ ID NO: 199 or a sequence having at least 90%, at least 95%, or at least 99% identity thereto. In some embodiments, the TCR beta variable domain comprises SEQ ID NO: 200 or a sequence having at least 90%, at least 95%, or at least 99% identity thereto.

### Loss of Y Chromosome Antigens

[0165] In some embodiments, the second, inhibitor ligand comprises a Y chromosome gene, i.e. peptide encoded by a gene on the Y chromosome. In some embodiments, the second, inhibitor ligand comprises a peptide encoded by a Y chromosome gene that is lost in target cells through loss of Y chromosome (LoY). For example, about a third of the characterized MiHAs come from the Y chromosome. The Y chromosome contains over 200 protein coding genes, all of which are envisaged as within the scope of the instant disclosure.

[0166] As used herein, “loss of Y”, or “LoY” refers a genetic change that occurs at high frequency in tumors whereby one copy of part or all of the Y chromosome is deleted, leading to a loss of Y chromosome encoded gene(s).

[0167] Loss of Y chromosome is known to occur in certain cancers. For example, there is a reported 40% somatic loss of Y chromosome in renal clear cell cancers (Arseneault et al., Sci. Rep. 7: 44876 (2017)). Similarly, clonal loss of the Y chromosome was reported in 5 out of 31 in male breast cancer subjects (Wong et al., Oncotarget 6(42):44927-40 (2015)). Loss of the Y chromosome in tumors from male patients has been described as a “consistent feature” of head and neck cancer patients (el-Naggar et al., Am J Clin Pathol 105(1):102-8 (1996)). Further, Y chromosome loss was associated with X chromosome disomy in four of seven male patients with gastric cancer (Saal et al., Virchows Arch B Cell Pathol (1993)). Thus, Y chromosome genes can be lost in a variety of cancers, and can be used as inhibitor ligands with the engineered receptors of the instant disclosure targeting cancer cells.

### Antigen Binding Domains

[0168] The disclosure provides a first ligand binding domain that activates a first engineered receptor, thereby activating immune cells expressing the first engineered receptor, and a second ligand binding domain that activates a second engineered receptor that inhibits activation of immune cells expressing the second engineered receptor, even in the presence of the first engineered receptor bound to the first ligand.

[0169] Any type of ligand binding domain that can regulate the activity of a receptor in a ligand dependent manner is envisaged as within the scope of the instant disclosure. In some embodiments, the ligand binding domain is an antigen binding domain. Exemplary antigen binding domains include, inter alia, scFv, sdAb, Vβ-only domains, and TCR antigen binding domains derived from the TCR α and β chain variable domains.

[0170] In some embodiments, the first, activator LBD comprises an antigen binding domain. In some embodiments, the second, inhibitor LBD comprises an antigen binding domain. Any type of antigen binding domain is envisaged as within the scope of the instant disclosure.

[0171] For example, the first, activator LBD and/or the second, inhibitor LBD can comprise an antigen binding domain that can be expressed as part of a contiguous polypeptide chain including, for example, a single domain antibody fragment (sdAb) or heavy chain antibodies HCAb, a single chain antibody (scFv) derived from a murine, humanized or human antibodies (Harlow et al., 1999, In: Using Antibodies: A Laboratory Manual, Cold Spring Harbor Laboratory Press, N.Y.; Harlow et al., 1989, In: Antibodies: A Laboratory Manual, Cold Spring Harbor, N.Y.; Houston et al., 1988, Proc. Natl. Acad. Sci. USA 85:5879-5883; Bird et al., 1988, Science 242:423-426). In some aspects, the first, activator LBD and/or the second, inhibitor LBD comprises an antigen binding domain that comprises an antibody fragment. In further aspects, the activator LBD comprises an antibody fragment that comprises a scFv or an sdAb. In further aspects, the inhibitor LBD comprises an antibody fragment that comprises a scFv or an sdAb.

[0172] The term “antibody,” as used herein, refers to a protein, or polypeptide sequences derived from an immunoglobulin molecule, which specifically binds to an antigen. Antibodies can be intact immunoglobulins of polyclonal or monoclonal origin, or fragments thereof and can be derived from natural or from recombinant sources.

[0173] The terms “antibody fragment” or “antibody binding domain” refer to at least one portion of an antibody, or recombinant variants thereof, that contains the antigen binding domain, i.e., an antigenic determining variable region of an intact antibody, that is sufficient to confer recognition and specific binding of the antibody fragment to a target, such as an antigen and its defined epitope. Examples of antibody fragments include, but are not limited to, Fab, Fab′, F(ab′)2, and Fv fragments, single-chain (sc)Fv (“scFv”) antibody fragments, linear antibodies, single domain antibodies (abbreviated “sdAb”) (either VL or VH), camelid VHH domains, and multi-specific antibodies formed from antibody fragments.

[0174] The term “scFv” refers to a fusion protein comprising at least one antibody fragment comprising a variable region of a light chain and at least one antibody fragment comprising a variable region of a heavy chain, wherein the light and heavy chain variable regions are contiguously linked via a short flexible polypeptide linker, and capable of being expressed as a single polypeptide chain, and wherein the scFv retains the specificity of the intact antibody from which it is derived.

[0175] “Heavy chain variable region” or “VH” (or, in the case of single domain antibodies, e.g., nanobodies, “VHH”) with regard to an antibody refers to the fragment of the heavy chain that contains three CDRs interposed between flanking stretches known as framework regions, these framework regions are generally more highly conserved than the CDRs and form a scaffold to support the CDRs.

[0176] Unless specified, as used herein a scFv may have the VL and VH variable regions in either order, e.g., with respect to the N-terminal and C-terminal ends of the polypeptide, the scFv may comprise VL-linker-VH or may comprise VH-linker-VL.

[0177] The term “antibody light chain,” refers to the smaller of the two types of polypeptide chains present in antibody molecules in their naturally occurring conformations. Kappa (“K”) and lambda (“V”) light chains refer to the two major antibody light chain isotypes.

[0178] The term “recombinant antibody” refers to an antibody that is generated using recombinant DNA technology, such as, for example, an antibody expressed by a bacteriophage or yeast expression system. The term should also be construed to mean an antibody which has been generated by the synthesis of a DNA molecule encoding the antibody and which DNA molecule expresses an antibody protein, or an amino acid sequence specifying the antibody, wherein the DNA or amino acid sequence has been obtained using recombinant DNA or amino acid sequence technology which is available and well known in the art.

[0179] The term “Vβ domain”, “Vβ-only domain”, “β chain variable domain” or “single variable domain TCR (svd-TCR)” refers to an antigen binding domain that consists essentially of a single T Cell Receptor (TCR) beta variable domain that specifically binds to an antigen in the absence of a second TCR variable domain. In some embodiments, the first, activator LBD comprises or consists essentially of a Vβ-only domain. In some embodiments, the second, inhibitor LBD comprises or consists essentially of a Vβ-only domain.

[0180] In some embodiments, the Vβ-only domain may include additional elements besides the TCR variable domain, including additional amino acid sequences, additional protein domains (covalently associated, non-covalently associated or covalently and non-covalently associated with the TCR variable domain), fusion or non-covalent association of the TCR variable domain with other types of macromolecules (for example polynucleotides, polysaccharides, lipids, or a combination thereof), fusion or non-covalent association of the TCR variable domain with one or more small molecules, compounds, or ligands, or a combination thereof. Any additional element, as described, may be combined provided that the TCR variable domain is configured to specifically bind the epitope in the absence of a second TCR variable domain.

[0181] In other embodiments, the Vβ-only domain as described herein functions independently of an a chain that lacks a Vα segment. For example, in some embodiments the one or more Vβ-only domains are fused to transmembrane (e.g., CD3ζ and CD28) and intracellular domain proteins (e.g., CD3ζ, CD28, and/or 4-1BB) that are capable of activating T cells in response to antigen.

[0182] In some embodiments, the Vβ-only domain engages antigen using complementarity-determining regions (CDRs). Each s Vβ-only domain contains three complement determining regions (CDR1, CDR2, and CDR3).

[0183] In some embodiments, the first Vβ-only domain comprises a TCR Vβ domain or an antigen-binding fragment thereof.

[0184] In humans, the TCR variable regions of the α and γ chains are each encoded by a V and a J segment, whereas the variable region of β and δ chains are each additionally encoded by a D segment. There are multiple Variable (V), Diversity (D) and Joining (J) gene segments (e.g. 52 Vβ gene segments, 2 Dβ gene segments and 13 Jβ gene segments) (Janeway et al. (eds.), 2001, Immunobiology: The Immune System in Health and Disease. 5th Edition, New York, FIG. 4.13) which can be recombined in different V(D)J arrangements using the enzymes RAG-1 and RAG-2, which recognize recombination signal sequences (RSSs) adjacent to the coding sequences of the V, D and J gene segments. The RSSs consist of conserved heptamers and nonamers separated by spacers of 12 or 23 bp. The RSSs are found at the 3′ side of each V segment, on both the 5′ and 3′ sides of each D segment, and at the 5′ of each J segment. During recombination, RAG-1 and RAG-2 cause the formation of DNA hairpins at the coding ends of the joint (the coding joint) and removal of the RSSs and intervening sequence between them (the signal joint). The variable regions are further diversified at the junctions by deletion of a variable number of coding end nucleotides, the random addition of nucleotides by terminal deoxynucleotidyl transferase (TdT), and palindromic nucleotides that arise due to template-mediated fill-in of the asymmetrically cleaved coding hairpins.

[0185] Patent applications WO 2009/129247 (herein incorporated by reference in its entirety) discloses an in vitro system, referred to as the HuTarg system, which utilizes V(D)J recombination to generate de novo antibodies in vitro. This same system was used to generate the variable regions of the Vβ-only domain as in patent application WO 2017/091905 (herein incorporated by reference in its entirety) by using TCR-specific V, D and J elements. In natural in vivo systems, the nucleic acid sequences which encode CDR1 and CDR2 are contained within the V (α, β, γ or δ) gene segment and the sequence encoding CDR3 is made up from portions of V and J segments (for Vα or Vγ) or a portion of the V segment, the entire D segment and a portion of the J segment (for Vβ or Vδ), but with random insertions and deletions of nucleotides at the V-J and V-D-J recombination junctions due to action of TdT and other recombination and DNA repair enzymes. The recombined T-cell receptor gene comprises alternating framework (FR) and CDR sequences, as does the resulting T-cell receptor expressed therefrom (i.e. FR1-CDR1-FR2-CDR2-FR3-CDR3-FR4). Using in vitro V(D)J recombination (i.e. V-J or V-D-J recombination), randomized insertions and deletions may be added in or adjacent to CDR1, CDR2 and/or CDR3 (i.e. not just CDR3), additional insertions may be added using flanking sequences in recombination substrates before and/or after CDR1, CDR2 and/or CDR3, and additional deletions may be made by deleting sequences in recombination substrates in or adjacent to CDR1, CDR2 and/or CDR3.

### Engineered Receptors

[0186] The disclosure provides a first engineered receptor comprising a first activator ligand binding domain and a second engineered receptor comprising a second inhibitor ligand binding domain described herein.

### Chimeric Antigen Receptors (CARs)

[0187] In some embodiments, either the first or the second engineered receptor is a chimeric antigen receptor (CAR). In some embodiments, the first and second engineered receptors are chimeric antigen receptors. All CAR architectures are envisaged as within the scope of the instant disclosure.

### Extracellular Domains

[0188] In some embodiments, the first or second ligand binding domain is fused to the extracellular domain of the CAR.

[0189] In some embodiments, the extracellular domain of the receptor comprises a signal sequence. In some embodiments, the signal sequence is an N terminal signal sequence. In some embodiments, the signal sequence comprises a sequence of MDMRVPAQLLGLLLLWLRGARC (SEQ ID NO: 8919).

### Hinge Region

[0190] In some embodiments, the CARs of the present disclosure comprise an extracellular hinge region. Incorporation of a hinge region can affect cytokine production from CAR-T cells and improve expansion of CAR-T cells in vivo. Exemplary hinges can be isolated or derived from IgD and CD8 domains, for example IgG1.

[0191] In some embodiments, the hinge is isolated or derived from CD8α or CD28. In some embodiments, the CD8α hinge comprises an amino acid sequence having at least 80% identity, at least 90% identity, at least 95% identity, at least 99% identity or is identical to a sequence of TTTPAPRPPTPAPTIASQPLSLRPEACRPAAGGAVHTRGLDFACD (SEQ ID NO: 1). In some embodiments, the CD8α hinge comprises SEQ ID NO: 1. In some embodiments, the CD8α hinge consists essentially of SEQ ID NO: 1. In some embodiments, the CD8α hinge is encoded by a nucleotide sequence having at least 80% identity, at least 90% identity, at least 95% identity, at least 99% identity or is identical to a sequence of

(SEQ ID NO: 2)
ACCACGACGCCAGCGCCGCGACCACCAACACCGGCGCCCACCATCGCGT
CGCAGCCCCTGTCCCTGCGCCCAGAGGCGTGCCGGCCAGCGGCGGGGGG
CGCAGTGCACACGAGGGGGCTGGACTTCGCCTGTGAT.

[0192] In some embodiments, the CD8α hinge is encoded by SEQ ID NO: 2.

[0193] In some embodiments, the CD28 hinge comprises an amino acid sequence having at least 80% identity, at least 90% identity, at least 95% identity, at least 99% identity or is identical to a sequence of CTIEVMYPPPYLDNEKSNGTIIHVKGKHLCPSPLFPGPSKP (SEQ ID NO: 3). In some embodiments, the CD28 hinge comprises or consists essentially of SEQ ID NO: 3. In some embodiments, the CD28 hinge is encoded by a nucleotide sequence having at least 80% identity, at least 90% identity, at least 95% identity, at least 99% identity or is identical to a sequence of

(SEQ ID NO: 4)
TGTACCATTGAAGTTATGTATCCTCCTCCTTACCTAGACAATGAGAAGA
GCAATGGAACCATTATCCATGTGAAAGGGAAACACCTTTGTCCAAGTCC
CCTATTTCCCGGACCTTCTAAGCCC.

[0194] In some embodiments, the CD28 hinge is encoded by SEQ ID NO: 4.

### Transmembrane Domain

[0195] The CARs of the present disclosure can be designed to comprise a transmembrane domain that is fused to the extracellular domain of the CAR. In some embodiments, the transmembrane domain that naturally is associated with one of the domains in the CAR is used. For example, a CAR comprising a CD28 co-stimulatory domain might also use a CD28 transmembrane domain. In some instances, the transmembrane domain can be selected or modified by amino acid substitution to avoid binding of such domains to the transmembrane domains of the same or different surface membrane proteins to minimize interactions with other members of the receptor complex.

[0196] The transmembrane domain may be derived either from a natural or from a synthetic source. Where the source is natural, the domain may be derived from any membrane-bound or transmembrane protein. Transmembrane regions may be isolated or derived from (i.e. comprise at least the transmembrane region(s) of) the alpha, beta or zeta chain of the T-cell receptor, CD28, CD3 epsilon, CD45, CD4, CD5, CD8, CD9, CD16, CD22, CD33, CD37, CD64, CD80, CD86, CD134, CD137, CD154, or from an immunoglobulin such as IgG4. Alternatively the transmembrane domain may be synthetic, in which case it will comprise predominantly hydrophobic residues such as leucine and valine. In some embodiments, a triplet of phenylalanine, tryptophan and valine will be found at each end of a synthetic transmembrane domain. Optionally, a short oligo- or polypeptide linker, preferably between 2 and 10 amino acids in length may form the linkage between the transmembrane domain and the cytoplasmic signaling domain of the CAR. A glycine-serine doublet provides a particularly suitable linker.

[0197] In some embodiments of the CARs of the disclosure, the CARs comprise a CD28 transmembrane domain. In some embodiments, the CD28 transmembrane domain comprises an amino acid sequence having at least 80% identity, at least 90% identity, at least 95% identity, at least 99% identity or is identical to a sequence of FWVLVVVGGVLACYSLLVTVAFIIFWV (SEQ ID NO: 5). In some embodiments, the CD28 transmembrane domain comprises or consists essentially of SEQ ID NO: 5. In some embodiments, the CD28 transmembrane domain is encoded by a nucleotide sequence having at least 80% identity, at least 90% identity, at least 95% identity, at least 99% identity or is identical to a sequence of

(SEQ ID NO: 6)
TTCTGGGTGCTGGTCGTTGTGGGCGGCGTGCTGGCCTGCTACAGCCTGC
TGGTGACAGTGGCCTTCATCATCTTTTGGGTG.

[0198] In some embodiments, the CD28 transmembrane domain is encoded by SEQ ID NO: 6.

[0199] In some embodiments of the CARs of the disclosure, the CARs comprise an IL-2Rbeta transmembrane domain. In some embodiments, the IL-2Rbeta transmembrane domain comprises an amino acid sequence having at least 80% identity, at least 90% identity, at least 95% identity, at least 99% identity or is identical to a sequence of IPWLGHLLVGLSGAFGFIILVYLLI (SEQ ID NO: 7). In some embodiments, the IL-2Rbeta transmembrane domain comprises or consists essentially of SEQ ID NO: 7. In some embodiments, the IL-2Rbeta transmembrane domain is encoded by a nucleotide sequence having at least 80% identity, at least 90% identity, at least 95% identity, at least 99% identity or is identical to a sequence of

(SEQ ID NO: 8)
ATTCCGTGGC TCGGCCACCT CCTCGTGGGC CTCAGCGGGG
CTTTTGGCTT CATCATCTTA GTGTACTTGC TGATC.

[0200] In some embodiments, the IL-2Rbeta transmembrane domain is encoded by SEQ ID NO: 8.

### Cytoplasmic Domain

[0201] The cytoplasmic domain or otherwise the intracellular signaling domain of the CARs of the instant invention is responsible for activation of at least one of the normal effector functions of the immune cell in which the CAR has been placed. The term “effector function” refers to a specialized function of a cell. Effector functions of a regulatory T cell, for example, include the suppression or downregulation of induction or proliferation of effector T cells. Thus the term “intracellular signaling domain” refers to the portion of a protein which transduces the effector function signal and directs the cell to perform a specialized function. While usually the entire intracellular signaling domain can be employed, in many cases it is not necessary to use the entire domain. To the extent that a truncated portion of the intracellular signaling domain is used, such truncated portion may be used in place of the intact chain as long as it transduces the effector function signal. In some cases, multiple intracellular domains can be combined to achieve the desired functions of the CAR-T cells of the instant disclosure. The term intracellular signaling domain is thus meant to include any truncated portion of one or more intracellular signaling domains sufficient to transduce the effector function signal.

[0202] Examples of intracellular signaling domains for use in the CARs of the instant disclosure include the cytoplasmic sequences of the T cell receptor (TCR) and co-receptors that act in concert to initiate signal transduction following antigen receptor engagement, as well as any derivative or variant of these sequences and any synthetic sequence that has the same functional capability. Accordingly, the intracellular domain of CARs of the instant disclosure comprises at least one cytoplasmic activation domain. In some embodiments, the intracellular activation domain ensures that there is T-cell receptor (TCR) signaling necessary to activate the effector functions of the CAR T-cell. In some embodiments, the at least one cytoplasmic activation is a CD247 molecule (CD3ζ) activation domain, a stimulatory killer immunoglobulin-like receptor (KIR) KIR2DS2 activation domain, or a DNAX-activating protein of 12 kDa (DAP12) activation domain. In some embodiments, the CD3ζ activation domain comprises an amino acid sequence having at least 80% identity, at least 90% identity, at least 95% identity, at least 99% identity or is identical to a sequence of

(SEQ ID NO: 9)
RVKFSRSADAPAYKQGQNQLYNELNLGRREEYDVLDKRRGRDPEMGGKP
RRKNPQEGLYNELQKDKMAEAYSEIGMKGERRRGKGHDGLYQGLSTATK
DTYDALHMQALPPR.

[0203] In some embodiments, the CD3ζ activation domain comprises or consists essentially of SEQ ID NO: 9. In some embodiments, the CD3ζ activation domain is encoded by a nucleotide sequence having at least 80% identity, at least 90% identity, at least 95% identity, at least 99% identity or is identical to a sequence of

(SEQ ID NO: 10)
AGAGTGAAGTTCAGCAGGAGCGCAGACGCCCCCGCGTACAAGCAGGGCC
AGAACCAGCTCTATAACGAGCTCAATCTAGGACGAAGAGAGGAGTACGA
TGTTTTGGACAAGCGTAGAGGCCGGGACCCTGAGATGGGGGGAAAGCCG
AGAAGGAAGAACCCTCAGGAAGGCCTGTACAATGAACTGCAGAAAGATA
AGATGGCGGAGGCCTACAGTGAGATTGGGATGAAAGGCGAGCGCCGGAG
GGGCAAGGGGCACGATGGCCTTTACCAGGGACTCAGTACAGCCACCAAG
GACACCTACGACGCCCTTCACATGCAGGCCCTGCCCCCTCGC.

[0204] In some embodiments, the CD3ζ activation domain is encoded by SEQ ID NO: 10.

[0205] It is known that signals generated through the TCR alone are often insufficient for full activation of the T cell and that a secondary or co-stimulatory signal is also required. Thus, T cell activation can be said to be mediated by two distinct classes of cytoplasmic signaling sequence: those that initiate antigen-dependent primary activation through the TCR (primary cytoplasmic signaling sequences) and those that act in an antigen-independent manner to provide a secondary or co-stimulatory signal (secondary cytoplasmic signaling sequences).

[0206] Primary cytoplasmic signaling sequences regulate primary activation of the TCR complex either in a stimulatory way, or in an inhibitory way. Primary cytoplasmic signaling sequences that act in a stimulatory manner may contain signaling motifs which are known as immunoreceptor tyrosine-based activation motifs or ITAMs. In some embodiments, the ITAM contains a tyrosine separated from a leucine or an isoleucine by any two other amino acids (YxxL) (SEQ ID NO: 21).

[0207] In some embodiments, the cytoplasmic domain contains 1, 2, or 3 ITAMs. In some embodiments, the cytoplasmic domain contains 1 ITAM. In some embodiments, the cytoplasmic domain contains 2 ITAMs. In some embodiments, the cytoplasmic domain contains 3 ITAMs. In some embodiments, the cytoplasmic domain contains 4 ITAMs. In some embodiments, the cytoplasmic domain contains 5 ITAMs.

[0208] In some embodiments, the cytoplasmic domain is a CD3ζ activation domain. In some embodiments, CD3ζ activation domain comprises a single ITAM. In some embodiments, CD3ζ activation domain comprises two ITAMs. In some embodiments, CD3ζ activation domain comprises three ITAMs.

[0209] In some embodiments, the CD3ζ activation domain comprising a single ITAM comprises an amino acid sequence having at least 80% identity, at least 90% identity, at least 95% identity, at least 99% identity or is identical to a sequence of RVKFSRSADAPAYQQGQNQLYNELNLGRREEYDVLHMQALPPR (SEQ ID NO: 11). In some embodiments, the CD3ζ activation domain comprises SEQ ID NO: 11. In some embodiments, the CD3ζ activation domain comprising a single ITAM consists essentially of an amino acid sequence of RVKFSRSADAPAYQQGQNQLYNELNLGRREEYDVLHMQALPPR (SEQ ID NO: 11). In some embodiments, the CD3ζ activation domain comprising a single ITAM is encoded by a nucleotide sequence having at least 80% identity, at least 90% identity, at least 95% identity, at least 99% identity or is identical to a sequence of

(SEQ ID NO: 12)
AGAGTGAAGT TCAGCAGGAG CGCAGACGCC CCCGCGTACC
AGCAGGGCCA GAACCAGCTC TATAACGAGC TCAATCTAGG
ACGAAGAGAG GAGTACGATG TTTTGCACAT GCAGGCCCTG
CCCCCTCGC.

[0210] In some embodiments, the CD3ζ activation domain is encoded by SEQ ID NO: 12.

[0211] Further examples of ITAM containing primary cytoplasmic signaling sequences that can be used in the CARs of the instant disclosure include those derived from TCRζ, FcRγ, FcRβ, CD3γ, CD3δ, CD3ε, CD3ζ, CD5, CD22, CD79a, CD79b, and CD66d. It is particularly preferred that cytoplasmic signaling molecule in the CAR of the instant invention comprises a cytoplasmic signaling sequence derived from CD3ζ.

### Co-Stimulatory Domain

[0212] In some embodiments, the cytoplasmic domain of the CAR can be designed to comprise the CD3ζ signaling domain by itself or combined with any other desired cytoplasmic domain(s) useful in the context of the CAR of the instant disclosure. For example, the cytoplasmic domain of the CAR can comprise a CD3ζ chain portion and a co-stimulatory domain. The co-stimulatory domain refers to a portion of the CAR comprising the intracellular domain of a costimulatory molecule. A costimulatory molecule is a cell surface molecule other than an antigen receptor or its ligands that is required for an efficient response of lymphocytes to an antigen. Examples of such molecules include the co-stimulatory domain is selected from the group consisting of IL-2Rβ, Fc Receptor gamma (FcRγ), Fc Receptor beta (FcRβ), CD3g molecule gamma (CD3γ), CD3δ, CD3ε, CD5 molecule (CD5), CD22 molecule (CD22), CD79a molecule (CD79a), CD79b molecule (CD79b), carcinoembryonic antigen related cell adhesion molecule 3 (CD66d), CD27 molecule (CD27), CD28 molecule (CD28), TNF receptor superfamily member 9 (4-1BB), TNF receptor superfamily member 4 (OX40), TNF receptor superfamily member 8 (CD30), CD40 molecule (CD40), programmed cell death 1 (PD-1), inducible T cell costimulatory (ICOS), lymphocyte function-associated antigen-1 (LFA-1), CD2 molecule (CD2), CD7 molecule (CD7), TNF superfamily member 14 (LIGHT), killer cell lectin like receptor C2 (NKG2C) and CD276 molecule (B7-H3) c-stimulatory domains, or functional fragments thereof.

[0213] The cytoplasmic domains within the cytoplasmic signaling portion of the CARs of the instant disclosure may be linked to each other in a random or specified order. Optionally, a short oligo- or polypeptide linker, for example between 2 and 10 amino acids in length may form the linkage. A glycine-serine doublet provides an example of a suitable linker.

[0214] In some embodiments, the intracellular domains of CARs of the instant disclosure comprise at least one co-stimulatory domain. In some embodiments, the co-stimulatory domain is isolated or derived from CD28. In some embodiments, the CD28 co-stimulatory domain comprises an amino acid sequence having at least 80% identity, at least 90% identity, at least 95% identity, at least 99% identity or is identical to a sequence of

(SEQ ID NO: 13)
RSKRSRLLHSDYMNMTPRRPGPTRKHYQPYAPPRDFAAYRS.

[0215] In some embodiments, the CD28 co-stimulatory domain comprises or consists essentially of SEQ ID NO: 13. In some embodiments, the CD28 co-stimulatory domain is encoded by a nucleotide sequence having at least 80% identity, at least 90% identity, at least 95% identity, at least 99% identity or is identical to a sequence of

(SEQ ID NO: 14)
AGGAGCAAGCGGAGCAGACTGCTGCACAGCGACTACATGAACATGACCC
CCCGGAGGCCTGGCCCCACCCGGAAGCACTACCAGCCCTACGCCCCTCC
CAGGGATTTCGCCGCCTACCGGAGC.

[0216] In some embodiments, the CD28 co-stimulatory domain is encoded by SEQ ID NO: 14.

[0217] In some embodiments, the intracellular domain of the CARs of the instant disclosure comprises an interleukin-2 receptor beta-chain (IL-2Rbeta or IL-2R-beta) cytoplasmic domain. In some embodiments, the IL-2Rbeta domain is truncated. In some embodiments, the IL-2Rbeta cytoplasmic domain comprises one or more STAT5-recruitment motifs. In some embodiments, the CAR comprises one or more STAT5-recruitment motifs outside the IL-2Rbeta cytoplasmic domain.

[0218] In some embodiments, the IL-2-Rbeta intracellular domain comprises an amino acid sequence having at least 80% identity, at least 90% identity, at least 95% identity, at least 99% identity or is identical to a sequence of

(SEQ ID NO: 15)
NCRNTGPWLKKVLKCNTPDPSKFFSQLSSEHGGDVQKWLSSPFPSSSFSP
GGLAPEISPLEVLERDKVTQLLPLNTDAYLSLQELQGQDPTHLV.

[0219] In some embodiments, the IL2R-beta intracellular domain comprises or consists essentially of SEQ ID NO: 15. In some embodiments, the IL-2R-beta intracellular domain is encoded by a nucleotide sequence having at least 80% identity, at least 90% identity, at least 95% identity, at least 99% identity or is identical to a sequence of

(SEQ ID NO: 16)

| | |
|---|---|
| 1 | AACTGCAGGA ACACCGGGCC ATGGCTGAAG AAGGTCCTGA |
| | AGTGTAACAC CCCAGACCCC |
| 61 | TCGAAGTTCT TTTCCCAGCT GAGCTCAGAG CATGGAGGCG |
| | ACGTCCAGAA GTGGCTCTCT |
| 121 | TCGCCCTTCC CCTCATCGTC CTTCAGCCCT GGCGGCCTGG |
| | CACCTGAGAT CTCGCCACTA |
| 181 | GAAGTGCTGG AGAGGGACAA GGTGACGCAG CTGCTCCCCC |
| | TGAACACTGA TGCCTACTTG |
| 241 | TCTCTCCAAG AACTCCAGGG TCAGGACCCA ACTCACTTGG |
| | TG. |

[0220] In some embodiments, the IL-2R-beta intracellular domain is encoded by SEQ ID NO: 16.

[0221] In an embodiment, the IL-2R-beta cytoplasmic domain comprises one or more STAT5-recruitment motifs. Exemplary STAT5-recruitment motifs are provided by Passerini et al. (2008) STAT5-signaling cytokines regulate the expression of FOXP3 in CD4+CD25+ regulatory T cells and CD4+CD25+ effector T cells. International Immunology, Vol. 20, No. 3, pp. 421-431, and by Kagoya et al. (2018) A novel chimeric antigen receptor containing a JAK-STAT signaling domain mediates superior antitumor effects. Nature Medicine doi:10.1038/nm.4478.

[0222] In some embodiments, the STAT5-recruitment motif(s) consists of the sequence Tyr-Leu-Ser-Leu (SEQ ID NO: 17).

### Inhibitory Domains

[0223] In some embodiments, for example in the second engineered receptors of the disclosure which provide an inhibitory signal, the inhibitory signal is transmitted through the intracellular domain of the receptor. In some embodiments, the engineered receptor comprises an inhibitory intracellular domain. In some embodiments, the second engineered receptor is a CAR comprising an inhibitory intracellular domain (an inhibitory CAR).

[0224] In some embodiments, the inhibitory intracellular domain comprises an immunoreceptor tyrosine-based inhibitory motif (ITIM). In some embodiments, the inhibitory intracellular domain comprising an ITIM can be isolated or derived from an immune checkpoint inhibitor such as CTLA-4 and PD-1. CTLA-4 and PD-1 are immune inhibitory receptors expressed on the surface of T cells, and play a pivotal role in attenuating or terminating T cell responses.

[0225] Inhibitory domains can be isolated from human tumor necrosis factor related apoptosis inducing ligand (TRAIL) receptor and CD200 receptor 1.

[0226] In some embodiments, the inhibitory domain comprises an intracellular domain, a transmembrane or a combination thereof. In some embodiments, the inhibitory domain comprises an intracellular domain, a transmembrane domain, a hinge region or a combination thereof. In some embodiments, the inhibitory domain comprises an immunoreceptor tyrosine-based inhibitory motif (ITIM). In some embodiments, the inhibitory domain comprising an ITIM can be isolated or derived from an immune checkpoint inhibitor such as CTLA-4 and PD-1.

[0227] Inhibitory domains can be isolated from human tumor necrosis factor related apoptosis inducing ligand (TRAIL) receptor and CD200 receptor 1. In some embodiments, the inhibitory domain is isolated or derived from a human protein, for example a human TRAIL receptor, CTLA-4, or PD-1 protein. In some embodiments, the TRAIL receptor comprises TR10A, TR10B or TR10D.

[0228] Endogenous TRAIL is expressed as a 281-amino acid type II trans-membrane protein, which is anchored to the plasma membrane and presented on the cell surface. TRAIL is expressed by natural killer cells, which, following the establishment of cell-cell contacts, can induce TRAIL-dependent apoptosis in target cells. Physiologically, the TRAIL-signaling system was shown to be essential for immune surveillance, for shaping the immune system through regulating T-helper cell 1 versus T-helper cell 2 as well as “helpless” CD8+ T-cell numbers, and for the suppression of spontaneous tumor formation.

[0229] In some embodiments, the inhibitory domain comprises an intracellular domain isolated or derived from a CD200 receptor. The cell surface glycoprotein CD200 receptor 1 (Uniprot ref: Q8TD46) represents another example of an inhibitory intracellular domain of the present invention. This inhibitory receptor for the CD200/OX2 cell surface glycoprotein limits inflammation by inhibiting the expression of proinflammatory molecules including TNF-alpha, interferons, and inducible nitric oxide synthase (iNOS) in response to selected stimuli.

[0230] In some embodiments, the engineered receptor comprises an inhibitory domain isolated or derived from killer cell immunoglobulin like receptor, three Ig domains and long cytoplasmic tail 2 (KIR3DL2), killer cell immunoglobulin like receptor, three Ig domains and long cytoplasmic tail 3 (KIR3DL3), leukocyte immunoglobulin like receptor B1 (LIR1, also called LIR-1 and LILRB1), programmed cell death 1 (PD-1), Fc gamma receptor IIB (FcgRIIB), killer cell lectin like receptor K1 (NKG2D), CTLA-4, a domain containing a synthetic consensus ITIM, a ZAP70 SH2 domain (e.g., one or both of the N and C terminal SH2 domains), or ZAP70 KI_K369A (kinase inactive ZAP70).

[0231] In some embodiments, the inhibitory domain is isolated or derived from a human protein.

[0232] In some embodiments, the second, inhibitory receptor comprises a cytoplasmic domain and transmembrane domain isolated or derived from the same protein, for example an ITIM containing protein. In some embodiments, the second, inhibitory receptor comprises a cytoplasmic domain, a transmembrane domain, and an extracellular domain or a portion thereof isolated or derived isolated or derived from the same protein, for example an ITIM containing protein. In some embodiments, the second, inhibitory receptor comprises a hinge region isolated or derived from isolated or derived from the same protein as the intracellular domain and/or transmembrane domain, for example an ITIM containing protein.

[0233] In some embodiments, the second, inhibitory engineered receptor comprises an inhibitory domain. In some embodiments, the second, inhibitory engineered receptor comprises an inhibitory intracellular domain and/or an inhibitory transmembrane domain. In some embodiments, the second engineered receptor is a CAR comprising an inhibitory domain (an inhibitory CAR). In some embodiments, the inhibitory intracellular domain is fused to the intracellular domain of a CAR. In some embodiments, the inhibitory intracellular domain is fused to the transmembrane domain of a CAR.

### T Cell Receptors (TCRs)

[0234] In some embodiments, the first or second engineered receptor is a T Cell Receptor (TCR). In some embodiments, the first and second engineered receptors are T Cell Receptors (TCR).

[0235] As used herein, a “TCR”, sometimes also called a “TCR complex” or “TCR/CD3 complex” refers to a protein complex comprising a TCR alpha chain, a TCR beta chain, and one or more of the invariant CD3 chains (zeta, gamma, delta and epsilon), sometimes referred to as subunits. The TCR alpha and beta chains can be disulfide-linked to function as a heterodimer to bind to peptide-MHC complexes. Once the TCR alpha/beta heterodimer engages peptide-MHC, conformational changes in the TCR complex in the associated invariant CD3 subunits are induced, which leads to their phosphorylation and association with downstream proteins, thereby transducing a primary stimulatory signal. In an exemplary TCR complex, the TCR alpha and TCR beta polypeptides form a heterodimer, CD3 epsilon and CD3 delta form a heterodimer, CD3 epsilon and CD3 gamma for a heterodimer, and two CD3 zeta form a homodimer.

### Extracellular Domains

[0236] The disclosure provides a first engineered receptor comprising a first extracellular ligand binding domain and a second engineered receptor comprising a second extracellular ligand binding domain. Either the first engineered receptor, the second engineered receptor, or both, may be a TCR. Any suitable ligand binding domain may be fused to an extracellular domain, hinge domain or transmembrane of the engineered TCRs described herein.

[0237] In some embodiments, the first and/or second ligand binding domain is fused to an extracellular domain of a TCR subunit. The TCR subunit can be TCR alpha, TCR beta, CD3 delta, CD3 epsilon or CD3 gamma. In some embodiments, both the first and second ligand binding domains are fused to the same TCR subunit in different TCR receptors. In some embodiments, the first and second ligand binding domains are fused to different TCR subunits in different TCR receptors. In some embodiments, the first, activator ligand binding domain is fused to a first TCR subunit in a first engineered receptor and the second, inhibitor ligand binding domain is fused to a second TCR subunit in a second engineered receptor. In some embodiments, the first and second TCR subunits are not the same subunit. In some embodiments, the first and second TCR subunits are the same subunit. For example, the first ligand binding domain can be fused to TCR alpha, and the second ligand binding domain can be fused to TCR beta. As a further example, the first ligand binding is fused to TCR beta and the second ligand binding domain used fused to TCR alpha.

[0238] In some embodiments, the first, activator LBD comprises an scFv domain and the second, inhibitor LBD comprises a Vβ-only domain. In some embodiments, the first, activator LBD comprises a Vβ-only domain and the second, inhibitor LBD comprises an scFv domain. In some embodiments, both the first, activator LBD and the second, inhibitor LBD are scFv domains. In some embodiments, both the first, activator LBD and the second, inhibitor LBD are Vβ-only domains.

[0239] In some embodiments, the first engineered TCR of the disclosure comprises an extracellular domain comprising a Vβ-only domain, a transmembrane domain and an intracellular domain. In some embodiments, the intracellular domain comprises one or more exogenous domains.

[0240] In some embodiments, the first engineered TCR of the disclosure comprises an extracellular domain comprising an scFv domain, a transmembrane domain and an intracellular domain. In some embodiments, the intracellular domain comprises one or more exogenous domains.

[0241] In some embodiments, the second engineered TCR of the disclosure comprises an extracellular domain comprising a Vβ-only domain, a transmembrane domain and an inhibitory intracellular domain.

[0242] In some embodiments, the second engineered TCR of the disclosure comprises an extracellular domain comprising an scFv domain, a transmembrane domain and an inhibitory intracellular domain.

[0243] TCR subunits include TCR alpha, TCR beta, CD3 zeta, CD3 delta, CD3 gamma and CD3 epsilon. Any one or more of TCR alpha, TCR beta chain, CD3 gamma, CD3 delta or CD3 epsilon, or fragments or derivative thereof, can be fused to one or more domains capable of providing a stimulatory signal of the disclosure, thereby enhancing TCR function and activity. Any one or more of TCR alpha, TCR beta chain, CD3 gamma, CD3 delta or CD3 epsilon, or fragments or derivative thereof, can be fused to an inhibitory intracellular domain of the disclosure.

[0244] In some embodiments, for example those embodiments wherein the first engineered receptor or second engineered receptor comprises a first and a second polypeptide, the antigen binding domain is isolated or derived from a T cell receptor (TCR) extracellular domain or an antibody.

[0245] In some embodiments, the first engineered receptor and second engineered receptor comprise a first antigen binding domain and a second antigen binding domain. The antigen-binding domain or domains of the engineered receptor may be provided on the same or a different polypeptide as the intracellular domain.

[0246] In some embodiments, the antigen-binding domain of the first and/or second engineered receptor comprises a single chain variable fragment (scFv).

[0247] In some embodiments, the first and/or second engineered receptor comprises a second polypeptide. The disclosure provides receptors having two polypeptides each having a part of a ligand-binding domain (e.g. cognates of a heterodimeric LDB, such as a TCRα/β- or Fab-based LBD). The disclosure further provides receptors having two polypeptides, each having a part of a ligand-binding domain (e.g. cognates of a heterodimeric LDB, such as a TCRα/β- or Fab-based LBD) and one part of the ligand binding domain is fused to a hinge or transmembrane domain, while the other part of the ligand binding domain has no intracellular domain. Further variations include receptors where each polypeptide has a hinge domain, and where each polypeptide has a hinge and transmembrane domain. In some embodiments, the hinge domain is absent. In other embodiments, the hinge domain is a membrane proximal extracellular region (MPER), such as the LILRB1 D3D4 domain.

[0248] In some embodiments, for example those embodiments where the first and/or second engineered receptor comprises at least two polypeptides, the first polypeptide comprises a first chain of an antibody and the second polypeptide comprise a second chain of said antibody.

[0249] In some embodiments, the receptor comprises a Fab fragment of an antibody. In embodiments, a first polypeptide comprises an antigen-binding fragment of the heavy chain of the antibody and an intracellular domain, and a second polypeptide comprises an antigen-binding fragment of the light chain of the antibody. In some embodiments, the first polypeptide comprises an antigen-binding fragment of the light chain of the antibody and the intracellular domain, and the second polypeptide comprises an antigen-binding fragment of the heavy chain of the antibody.

[0250] In some embodiments, the first and/or second engineered receptor comprises an extracellular fragment of a T cell receptor (TCR). In some embodiments, a first polypeptide comprises an antigen-binding fragment of the alpha chain of the TCR and the intracellular domain, and a second polypeptide comprises an antigen-binding fragment of the beta chain of the TCR. In some embodiments, a first polypeptide comprises an antigen-binding fragment of the beta chain of the TCR and the intracellular domain, and the second polypeptide comprises an antigen-binding fragment of the alpha chain of the TCR.

### Transmembrane Domains

[0251] The disclosure provide a first fusion protein comprising a first, activator LBD and a second fusion protein comprising a second, inhibitor LBD and an inhibitor intracellular domain. In some embodiments, the first and second fusion proteins comprise transmembrane domains.

[0252] The disclosure provides polypeptides comprising a transmembrane domain, and an intracellular domain capable of providing a stimulatory signal or an inhibitory signal. In some embodiments, the engineered TCR comprises multiple intracellular domains capable of providing a stimulatory signal.

[0253] A “transmembrane domain”, as used herein, refers to a domain of a protein that spans membrane of the cell. Transmembrane domains typically consist predominantly of non-polar amino acids, and may traverse the lipid bilayer once or several times. Transmembrane domains usually comprise alpha helices, a configuration which maximizes internal hydrogen bonding.

[0254] Transmembrane domains isolated or derived from any source are envisaged as within the scope of the fusion proteins of the disclosure.

[0255] In some embodiments, the transmembrane domain is one that is associated with one of the other domains of the fusion protein, or isolated or derived from the same protein as one of the other domains of the fusion protein. In some embodiments, the transmembrane domain and the second intracellular domain are from the same protein, for example a TCR complex subunit such as TCR alpha, TCR beta, CD3 delta, CD3 epsilon or CD3 gamma. In some embodiments, the extracellular domain (svd-TCR), the transmembrane domain and the second intracellular domain are from the same protein, for example a TCR complex subunit such as TCR alpha, TCR beta, CD3 delta, CD3 epsilon or CD3 gamma. In other embodiments, the extracellular domain (comprising one or more ligand binding domains, such as Vo-only domain and scFv domains), the transmembrane domain and the intracellular domain(s) are from different proteins. For example, in some embodiments the engineered svd-TCR comprises a CD28 transmembrane domain with a CD28, 4-1BB and CD3ζ intracellular domain.

[0256] The transmembrane domain may be derived either from a natural or from a recombinant source. Where the source is natural, the domain may be derived from any membrane-bound or transmembrane protein.

[0257] In some embodiments, the transmembrane domain is capable of signaling to the intracellular domain(s) whenever the TCR complex has bound to a target. A transmembrane domain of particular use in this invention may include at least the transmembrane region(s) of e.g., the alpha, beta or zeta chain of the TCR, CD3 delta, CD3 epsilon or CD3 gamma, CD28, CD3 epsilon, CD45, CD4, CD5, CD8, CD9, CD16, CD22, CD33, CD37, CD64, CD80, CD86, CD134, CD137, CD154.

[0258] In some embodiments, the transmembrane domain can be attached to the extracellular region of the fusion protein, e.g., the antigen binding domain of the TCR alpha or beta chain, via a hinge, e.g., a hinge from a human protein. For example, in one embodiment, the hinge can be a human immunoglobulin (Ig) hinge, e.g., an IgG4 hinge, or a CD8α hinge.

[0259] In some embodiments, the hinge is isolated or derived from CD8α or CD28. In some embodiments, the CD8α hinge comprises an amino acid sequence having at least 80% identity, at least 90% identity, at least 95% identity, at least 99% identity or is identical to a sequence of TTTPAPRPPTPAPTIASQPLSLRPEACRPAAGGAVHTRGLDFACD (SEQ ID NO: 1). In some embodiments, the CD8α hinge comprises SEQ ID NO: 1. In some embodiments, the CD8α hinge consists essentially of SEQ ID NO: 1. In some embodiments, the CD8α hinge is encoded by a nucleotide sequence having at least 80% identity, at least 90% identity, at least 95% identity, at least 99% identity or is identical to a sequence of:

(SEQ ID NO: 2)
ACCACGACGCCAGCGCCGCGACCACCAACACCGGCGCCCACCATCGCGTC
GCAGCCCCTGTCCCTGCGCCCAGAGGCGTGCCGGCCAGCGGCGGGGGGCG
CAGTGCACACGAGGGGGCTGGACTTCGCCTGTGAT.

[0260] In some embodiments, the CD8α hinge is encoded by SEQ ID NO: 2.

[0261] In some embodiments, the CD28 hinge comprises an amino acid sequence having at least 80% identity, at least 90% identity, at least 95% identity, at least 99% identity or is identical to a sequence of CTIEVMYPPPYLDNEKSNGTIIHVKGKHLCPSPLFPGPSKP (SEQ ID NO: 3. In some embodiments, the CD28 hinge comprises or consists essentially of SEQ ID NO: 3. In some embodiments, the CD28 hinge is encoded by a nucleotide sequence having at least 80% identity, at least 90% identity, at least 95% identity, at least 99% identity or is identical to a sequence of

(SEQ ID NO: 4)
TGTACCATTGAAGTTATGTATCCTCCTCCTTACCTAGACAATGAGAAGAG
CAATGGAACCATTATCCATGTGAAAGGGAAACACCTTTGTCCAAGTCCCC
TATTTCCCGGACCTTCTAAGCCC.

[0262] In some embodiments, the CD28 hinge is encoded by SEQ ID NO: 4.

[0263] In some embodiments, the transmembrane domain comprises a TCR alpha transmembrane domain. In some embodiments, the TCR alpha transmembrane domain comprises an amino acid sequence having at least 85% identity, at least 90% identity, at least 95% identity, at least 96% identity, at least 97% identity, at least 98% identity, at least 99% identity or is identical to a sequence of: VIGFRILLLKVAGFNLLMTLRLW (SEQ ID NO: 26). In some embodiments, the TCR alpha transmembrane domain comprises, or consists essentially of, SEQ ID NO: 26. In some embodiments, the TCR alpha transmembrane domain is encoded by a sequence of

(SEQ ID NO: 27)
GTGATTGGGTTCCGAATCCTCCTCCTGAAAGTGGCCGGGTTTAATCTGCT
CATGACGCTGCGGCTGTGG.

[0264] In some embodiments, the transmembrane domain comprises a TCR beta transmembrane domain. In some embodiments, the TCR beta transmembrane domain comprises an amino acid sequence having at least 85% identity, at least 90% identity, at least 95% identity, at least 96% identity, at least 97% identity, at least 98% identity, at least 99% identity or is identical to a sequence of: TILYEILLGKATLYAVLVSALVL (SEQ ID NO: 28). In some embodiments, the TCR beta transmembrane domain comprises, or consists essentially of, SEQ ID NO: 28. In some embodiments, the TCR beta transmembrane domain is encoded by a sequence of

(SEQ ID NO: 20)
ACCATCCTCTATGAGATCTTGCTAGGGAAGGCCACCTTGTATGCCGTGCT
GGTCAGTGCCCTCGTGCTG.

[0265] In some embodiments, the transmembrane comprises a CD3 zeta transmembrane domain. In some embodiments, the CD3 zeta transmembrane domain comprises an amino acid sequence having at least 85% identity, at least 90% identity, at least 95% identity, at least 96% identity, at least 97% identity, at least 98% identity, at least 99% identity or is identical to a sequence of: LCYLLDGILFIYGVILTALFL (SEQ ID NO: 29). In some embodiments, the CD3 zeta transmembrane domain comprises, or consists essentially of, SEQ ID NO: 29.

[0266] A transmembrane domain can include one or more additional amino acids adjacent to the transmembrane region, e.g., one or more amino acid associated with the extracellular region of the protein from which the transmembrane was derived (e.g., 1, 2, 3, 4, 5, 6, 7, 8, 9, 10 or up to 15 amino acids of the extracellular region) and/or one or more additional amino acids associated with the intracellular region of the protein from which the transmembrane protein is derived (e.g., 1, 2, 3, 4, 5, 6, 7, 8, 9, 10 or up to 15 amino acids of the intracellular region).

[0267] In some embodiments, the transmembrane domain can be selected or modified by amino acid substitution to avoid binding of such domains to the transmembrane domains of the same or different surface membrane proteins, e.g., to minimize interactions with other members of the receptor complex.

[0268] When present, the transmembrane domain may be a natural TCR transmembrane domain, a natural transmembrane domain from a heterologous membrane protein, or an artificial transmembrane domain. The transmembrane domain may be a membrane anchor domain. Without limitation, a natural or artificial transmembrane domain may comprise a hydrophobic a-helix of about 20 amino acids, often with positive charges flanking the transmembrane segment. The transmembrane domain may have one transmembrane segment or more than one transmembrane segment. Prediction of transmembrane domains/segments may be made using publicly available prediction tools (e.g. TMHMM, Krogh et al. Journal of Molecular Biology 2001; 305(3):567-580; or TMpred, Hofmann & Stoffel Biol. Chem. Hoppe-Seyler 1993; 347: 166). Non-limiting examples of membrane anchor systems include platelet derived growth factor receptor (PDGFR) transmembrane domain, glycosylphosphatidylinositol (GPI) anchor (added post-translationally to a signal sequence) and the like.

### Intracellular Domain

[0269] The disclosure provides fusion proteins comprising an intracellular domain. An “intracellular domain,” as the term is used herein, refers to an intracellular portion of a protein.

[0270] In some embodiments, the intracellular domain comprises one or more domains capable of providing a stimulatory signal to a transmembrane domain. In some embodiments, the intracellular domain comprises a first intracellular domain capable of providing a stimulatory signal and a second intracellular domain capable of providing a stimulatory signal. In other embodiments, the intracellular domain comprises a first, second and third intracellular domain capable of providing a stimulatory signal. The intracellular domains capable of providing a stimulatory signal are selected from the group consisting of a CD28 molecule (CD28) domain, a LCK proto-oncogene, Src family tyrosine kinase (Lck) domain, a TNF receptor superfamily member 9 (4-1BB) domain, a TNF receptor superfamily member 18 (GITR) domain, a CD4 molecule (CD4) domain, a CD8a molecule (CD8a) domain, a FYN proto-oncogene, Src family tyrosine kinase (Fyn) domain, a zeta chain of T cell receptor associated protein kinase 70 (ZAP70) domain, a linker for activation of T cells (LAT) domain, lymphocyte cytosolic protein 2 (SLP76) domain, (TCR) alpha, TCR beta, CD3 delta, CD3 gamma and CD3 epsilon intracellular domains.

[0271] In some embodiments, an intracellular domain comprises at least one intracellular signaling domain. An intracellular signaling domain generates a signal that promotes a function a cell, for example an immune effector function of a TCR containing cell, e.g., a TCR-expressing T-cell. In some embodiments, the intracellular domain of the fusion proteins of the disclosure includes at least one intracellular signaling domain. For example, the intracellular domains of CD3 gamma, delta or epsilon comprise signaling domains.

[0272] In some embodiments, the extracellular domain, transmembrane domain and intracellular domain are isolated or derived from the same protein, for example T-cell receptor (TCR) alpha, TCR beta, CD3 delta, CD3 gamma or CD3 epsilon.

[0273] Examples of intracellular domains for use in the fusion proteins of the disclosure include the cytoplasmic sequences of the TCR alpha, TCR beta, CD3 zeta, and 4-1BB, and the intracellular signaling co-receptors that act in concert to initiate signal transduction following antigen receptor engagement, as well as any derivative or variant of these sequences and any recombinant sequence that has the same functional capability.

[0274] In some embodiments, the intracellular signaling domain comprises a primary intracellular signaling domain. Exemplary primary intracellular signaling domains include those derived from the proteins responsible for primary stimulation, or antigen dependent stimulation.

[0275] An intracellular signaling domain is generally responsible for activation of at least one of the normal effector functions of the immune cell in which the fusion protein has been introduced. The term “effector function” refers to a specialized function of a cell. Effector function of a T-cell, for example, may be cytolytic activity or helper activity including the secretion of cytokines. Thus the term “intracellular signaling domain” refers to the portion of a protein which transduces the effector function signal and directs the cell to perform a specialized function.

[0276] While in some cases the entire intracellular signaling domain can be employed, in many cases it is not necessary to use the entire intracellular signaling domain. To the extent that a truncated portion of the intracellular signaling domain is used, such truncated portion may be used in place of the intact chain as long as it transduces the effector function signal. The term intracellular signaling domain is thus meant to include any truncated portion of the intracellular signaling domain sufficient to transduce the effector function signal.

[0277] In some embodiments, the intracellular domain comprises a CD3 delta intracellular domain. In some embodiments, the CD3 delta intracellular domain comprises an amino acid sequence having at least 85% identity, at least 90% identity, at least 95% identity, at least 96% identity, at least 97% identity, at least 98% identity, at least 99% identity or is identical to a sequence of

(SEQ ID NO: 30)
GHETGRLSGAADTQALLRNDQVYQPLRDRDDAQYSHLGGNWARNKGGSRS
KRSRLLHSDYMNMTPRRPGPTRKHYQPYAPPRDFAAYRS.

[0278] In some embodiments, the CD3 delta intracellular domain comprises or consists essentially of, SEQ ID NO: 30. In some embodiments, the CD3 delta intracellular domain is encoded by a sequence of

(SEQ ID NO: 31)

| | |
|---|---|
| 1 | GGACATGAGA CTGGAAGGCT GTCTGGGGCT GCCGACACAC |
| | AAGCTCTGTT GAGGAATGAC |
| 61 | CAGGTCTATC AGCCCCTCCG AGATCGAGAT GATGCTCAGT |
| | ACAGCCACCT TGGAGGAAAC |
| 121 | TGGGCTCGGA ACAAGGGCGG AAGCAGGAGC AAGCGGAGCA |
| | GACTGCTGCA CAGCGACTAC |
| 181 | ATGAACATGA CCCCCCGGAG GCCTGGCCCC ACCCGGAAGC |
| | ACTACCAGCC CTACGCCCCT |
| 241 | CCCAGGGATT TCGCCGCCTA CCGGAGCTA. |

[0279] In some embodiments, the intracellular domain comprises a CD3 epsilon intracellular domain. In some embodiments, the CD3 epsilon intracellular domain comprises an amino acid sequence having at least 85% identity, at least 90% identity, at least 95% identity, at least 96% identity, at least 97% identity, at least 98% identity, at least 99% identity or is identical to a sequence of: KNRKAKAKPVTRGAGAGGRQRGQNKERPPPVPNPDYEPIRKGQRDLYSGLNQRRIGGS RSKRSRLLHSDYMNMTPRRPGPTRKHYQPYAPPRDFAAYRS (SEQ ID NO: 32). In some embodiments, the CD3 epsilon intracellular domain comprises or consists essentially of, SEQ ID NO: 32. In some embodiments, the CD3 epsilon intracellular domain is encoded by a sequence of

(SEQ ID NO: 19)

| | |
|---|---|
| 1 | AAGAATAGAA AGGCCAAGGC CAAGCCTGTG ACACGAGGAG |
| | CGGGTGCTGG CGGCAGGCAA |
| 61 | AGGGGACAAA ACAAGGAGAG GCCACCACCT GTTCCCAACC |
| | CAGACTATGA GCCCATCCGG |
| 121 | AAAGGCCAGC GGGACCTGTA TTCTGGCCTG AATCAGCGCA |
| | GAATCGGCGG AAGCAGGAGC |
| 181 | AAGCGGAGCA GACTGCTGCA CAGCGACTAC ATGAACATGA |
| | CCCCCCGGAG GCCTGGCCCC |
| 241 | ACCCGGAAGC ACTACCAGCC CTACGCCCCT CCCAGGGATT |
| | TCGCCGCCTA CCGGAGCTAG. |

[0280] In some embodiments, the intracellular domain comprises a CD3 gamma intracellular domain. In some embodiments, the CD3 gamma intracellular domain comprises an amino acid sequence having at least 85% identity, at least 90% identity, at least 95% identity, at least 96% identity, at least 97% identity, at least 98% identity, at least 99% identity or is identical to a sequence of

(SEQ ID NO: 33)
GQDGVRQSRASDKQTLLPNDQLYQPLKDREDDQYSHLQGNQLRRNGGSRS
KRSRLLHSDYMNMTPRRPGPTRKHYQPYAPPRDFAAYRS.

[0281] In some embodiments, the CD3 gamma intracellular domain comprises, or consists essentially of, SEQ ID NO: 33. In some embodiments, the CD3 gamma intracellular domain is encoded by a sequence of

(SEQ ID NO: 22)

| | |
|---|---|
| 1 | GGACAGGATG GAGTTCGCCA GTCGAGAGCT TCAGACAAGC |
| | AGACTCTGTT GCCCAATGAC |
| 61 | CAGCTCTACC AGCCCCTCAA GGATCGAGAA GATGACCAGT |
| | ACAGCCACCT TCAAGGAAAC |
| 121 | CAGTTGAGGA GGAATGGCGG AAGCAGGAGC AAGCGGAGCA |
| | GACTGCTGCA CAGCGACTAC |
| 181 | ATGAACATGA CCCCCCGGAG GCCTGGCCCC ACCCGGAAGC |
| | ACTACCAGCC CTACGCCCCT |
| 241 | CCCAGGGATT TCGCCGCCTA CCGGAGCTAG. |

[0282] In some embodiments, the intracellular domain comprises a CD3 zeta intracellular domain. In some embodiments, the CD3 zeta intracellular domain comprises an amino acid sequence having at least 85% identity, at least 90% identity, at least 95% identity, at least 96% identity, at least 97% identity, at least 98% identity, at least 99% identity or is identical to a sequence of RVKFSRSADAPAYKQGQNQLYNELNLGRREEYDVLDKRRGRDPEMGGKPRRKNPQEG LYNELQKDKMAEAYSEIGMKGERRRGKGHDGLYQGLSTATKDTYDALHMQALPPR (SEQ ID NO: 9) or a subsequence thereof.

[0283] In some embodiments, the CD3 zeta intracellular domain comprises, or consists essentially of, SEQ ID NO: 9.

[0284] In some embodiments, the intracellular domain comprises a TCR alpha intracellular domain. In some embodiments, a TCR alpha intracellular domain comprises Ser-Ser. In some embodiments, a TCR alpha intracellular domain is encoded by a sequence of TCCAGC.

[0285] In some embodiments, the intracellular domain comprises a TCR beta intracellular domain. In some embodiments, the TCR beta intracellular domain comprises an amino acid sequence having at least 80% identity, at least 90% identity, or is identical to a sequence of: MAMVKRKDSR (SEQ ID NO: 35). In some embodiments, the TCR beta intracellular domain comprises, or consists essentially of SEQ ID NO: 35. In some embodiments, the TCR beta intracellular domain is encoded by a sequence of

(SEQ ID NO: 36)
ATGGCCATGGTCAAGAGAAAGGATTCCAGA.

[0286] In some embodiments, the intracellular signaling domain comprises at least one stimulatory intracellular domain. In some embodiments, the intracellular signaling domain comprises a primary intracellular signaling domain, such as a CD3 delta, CD3 gamma and CD3 epsilon intracellular domain, and one additional stimulatory intracellular domain, for example a co-stimulatory domain. In some embodiments, the intracellular signaling domain comprises a primary intracellular signaling domain, such as a CD3 delta, CD3 gamma and CD3 epsilon intracellular domain, and two additional stimulatory intracellular domains.

[0287] Exemplary co-stimulatory intracellular signaling domains include those derived from proteins responsible for co-stimulatory signals, or antigen independent stimulation.

[0288] The term “co-stimulatory molecule” refers to the cognate binding partner on a T-cell that specifically binds with a co-stimulatory ligand, thereby mediating a co-stimulatory response by the T-cell, such as, but not limited to, proliferation. Co-stimulatory molecules are cell surface molecules other than antigen receptors. Co-stimulatory molecules and their ligands are required for an efficient immune response. Co-stimulatory molecules include, but are not limited to an MHC class I molecule, BTLA, a Toll ligand receptor, as well as DAP10, DAP12, CD30, LIGHT, OX40, CD2, CD27, CDS, ICAM-1, LFA-1 (CD11a/CD18) 4-1BB (CD137, TNF receptor superfamily member 9), and CD28 molecule (CD28).

[0289] A “co-stimulatory domain”, sometimes referred to as “a co-stimulatory intracellular signaling domain” can be the intracellular portion of a co-stimulatory protein. A co-stimulatory domain can be a domain of a co-stimulatory protein that transduces the co-stimulatory signal. A co-stimulatory protein can be represented in the following protein families: TNF receptor proteins, Immunoglobulin-like proteins, cytokine receptors, integrins, signaling lymphocytic activation molecules (SLAM proteins), and activating NK cell receptors. Examples of such molecules include CD27, CD28, 4-1BB (CD137), OX40, GITR, CD30, CD40, ICOS, BAFFR, HVEM, lymphocyte function-associated antigen-1 (LFA-1), CD2, CD7, LIGHT, NKG2C, SLAMF7, NKp80, CD160, B7-H3, a ligand that specifically binds with CD83, CD4, and the like. The co-stimulatory domain can comprise the entire intracellular portion, or the entire native intracellular signaling domain, of the molecule from which it is derived, or a functional fragment thereof.

[0290] In some embodiments, the stimulatory domain comprises a co-stimulatory domain. In some embodiments, the co-stimulatory domain comprises a CD28 or 4-1BB co-stimulatory domain. CD28 and 4-1BB are well characterized co-stimulatory molecules required for full T cell activation and known to enhance T cell effector function. For example, CD28 and 4-1BB have been utilized in chimeric antigen receptors (CARs) to boost cytokine release, cytolytic function, and persistence over the first-generation CAR containing only the CD3 zeta signaling domain. Likewise, inclusion of co-stimulatory domains, for example CD28 and 4-1BB domains, in engineered TCR can increase T cell effector function and specifically allow co-stimulation in the absence of co-stimulatory ligand, which is typically down-regulated on the surface of tumor cells.

[0291] In some embodiments, the stimulatory domain comprises a CD28 intracellular domain. In some embodiments, the CD28 intracellular domain comprises an amino acid sequence having at least 85% identity, at least 90% identity, at least 95% identity, at least 96% identity, at least 97% identity, at least 98% identity, at least 99% identity or is identical to a sequence of: RSKRSRLLHSDYMNMTPRRPGPTRKHYQPYAPPRDFAAYRS (SEQ ID NO: 37). In some embodiments, the CD28 intracellular domain comprises, or consists essentially of, RSKRSRLLHSDYMNMTPRRPGPTRKHYQPYAPPRDFAAYRS (SEQ ID NO: 37). In some embodiments, a CD28 intracellular domain is encoded by a nucleotide sequence comprising:

(SEQ ID NO: 38)
AGGAGCAAGCGGAGCAGACTGCTGCACAGCGACTACATGAACATGACCCC
CCGGAGGCCTGGCCCCACCCGGAAGCACTACCAGCCCTACGCCCCTCCCA
GGGATTTCGCCGCCTACCGGAGC.

[0292] In some embodiments, the stimulatory domain comprises a 4-1BB intracellular domain. In some embodiments, the 4-1BB intracellular domain comprises an amino acid sequence having at least 85% identity, at least 90% identity, at least 95% identity, at least 96% identity, at least 97% identity, at least 98% identity, at least 99% identity or is identical to a sequence of: KRGRKKLLYIFKQPFMRPVQTTQEEDGCSCRFPEEEEGGCEL (SEQ ID NO: 39). In some embodiments, the 4-1BB intracellular domain comprises, or consists essentially of, KRGRKKLLYIFKQPFMRPVQTTQEEDGCSCRFPEEEEGGCEL (SEQ ID NO: 39). In some embodiments, a 4-1BB intracellular domain is encoded by a nucleotide sequence comprising:

(SEQ ID NO: 40)
AAACGGGGCAGAAAGAAACTCCTGTATATATTCAAACAACCATTTATGAG
GCCAGTACAAACTACTCAAGAGGAAGATGGCTGTAGCTGCCGATTTCCAG
AAGAAGAAGAAGGAGGATGTGAACTG.

[0293] In some embodiments, the intracellular domain of the activator receptor comprise a CD28 co-stimulatory domain, a 4-1BB co-stimulatory domain and a CD3 zeta cytoplasmic domain. In some embodiments, the intracellular domain comprises: RSKRSRLLHSDYMNMTPRRPGPTRKHYQPYAPPRDFAAYRSKRGRKKLLYIFKQPFMRP VQTTQEEDGCSCRFPEEEEGGCELRVKFSRSADAPAYKQGQNQLYNELNLGRREEYDV LDKRRGRDPEMGGKPRRKNPQEGLYNELQKDKMAEAYSEIGMKGERRRGKGHDGLY QGLSTATKDTYDALHMQALPPR (SEQ ID NO: 8918), or a sequence having at least 80% identity, at least 90% identity, at least 95% identity, or at least 99% identity thereto.

### Inhibitory Domains

[0294] The disclosure provides inhibitory intracellular domains which can be fused to the transmembrane or intracellular domain of any of the TCR subunits to generate an inhibitory TCR. In those embodiments where the inhibitory receptor is an inhibitory CAR, the same intracellular domains described below to generate an inhibitory TCR can also be used to generate an inhibitory CAR.

[0295] In some embodiments, the inhibitory intracellular domain comprises an immunoreceptor tyrosine-based inhibitory motif (ITIM). In some embodiments, the inhibitory intracellular domain comprising an ITIM can be isolated or derived from an immune checkpoint inhibitor such as CTLA-4 and PD-1. CTLA-4 and PD-1 are immune inhibitory receptors expressed on the surface of T cells, and play a pivotal role in attenuating or terminating T cell responses.

[0296] Inhibitory domains can be isolated from human tumor necrosis factor related apoptosis inducing ligand (TRAIL) receptor and CD200 receptor 1.

[0297] In some embodiments, the inhibitory domain comprises an intracellular domain, a transmembrane or a combination thereof. In some embodiments, the inhibitory domain comprises an intracellular domain, a transmembrane domain, a hinge region or a combination thereof. In some embodiments, the inhibitory domain comprises an immunoreceptor tyrosine-based inhibitory motif (ITIM). In some embodiments, the inhibitory domain comprising an ITIM can be isolated or derived from an immune checkpoint inhibitor such as CTLA-4 and PD-1.

[0298] Inhibitory domains can be isolated from human tumor necrosis factor related apoptosis inducing ligand (TRAIL) receptor and CD200 receptor 1. In some embodiments, the inhibitory domain is isolated or derived from a human protein, for example a human TRAIL receptor, CTLA-4, or PD-1 protein. In some embodiments, the TRAIL receptor comprises TR10A, TR10B or TR10D.

[0299] Endogenous TRAIL is expressed as a 281-amino acid type II trans-membrane protein, which is anchored to the plasma membrane and presented on the cell surface. TRAIL is expressed by natural killer cells, which, following the establishment of cell-cell contacts, can induce TRAIL-dependent apoptosis in target cells. Physiologically, the TRAIL-signaling system was shown to be essential for immune surveillance, for shaping the immune system through regulating T-helper cell 1 versus T-helper cell 2 as well as “helpless” CD8+ T-cell numbers, and for the suppression of spontaneous tumor formation.

[0300] In some embodiments, the inhibitory domain comprises an intracellular domain isolated or derived from a CD200 receptor. The cell surface glycoprotein CD200 receptor 1 (Uniprot ref: Q8TD46) represents another example of an inhibitory intracellular domain of the present invention. This inhibitory receptor for the CD200/OX2 cell surface glycoprotein limits inflammation by inhibiting the expression of proinflammatory molecules including TNF-alpha, interferons, and inducible nitric oxide synthase (iNOS) in response to selected stimuli.

[0301] In some embodiments, the engineered receptor comprises an inhibitory domain isolated or derived from killer cell immunoglobulin like receptor, three Ig domains and long cytoplasmic tail 2 (KIR3DL2), killer cell immunoglobulin like receptor, three Ig domains and long cytoplasmic tail 3 (KIR3DL3), leukocyte immunoglobulin like receptor B1 (LIR1), programmed cell death 1 (PD-1), Fc gamma receptor IIB (FcgRIIB), killer cell lectin like receptor K1 (NKG2D), CTLA-4, a domain containing a synthetic consensus ITIM, a ZAP70 SH2 domain (e.g., one or both of the N and C terminal SH2 domains), or ZAP70 KI_K369A(kinase inactive ZAP70).

[0302] In some embodiments, the inhibitory domain is isolated or derived from a human protein.

[0303] In some embodiments, the second, inhibitory receptor comprises a cytoplasmic domain and transmembrane domain isolated or derived from the same protein, for example an ITIM containing protein. In some embodiments, the second, inhibitory receptor comprises a cytoplasmic domain, a transmembrane domain, and an extracellular domain or a portion thereof isolated or derived isolated or derived from the same protein, for example an ITIM containing protein. In some embodiments, the second, inhibitory receptor comprises a hinge region isolated or derived from isolated or derived from the same protein as the intracellular domain and/or transmembrane domain, for example an ITIM containing protein.

[0304] In some embodiments, the second engineered receptor is a TCR comprising an inhibitory domain (an inhibitory TCR). In some embodiments, the inhibitory TCR comprises an inhibitory intracellular domain and/or an inhibitory transmembrane domain. In some embodiments, the inhibitory intracellular domain is fused to the intracellular domain of TCR alpha, TCR beta, CD3 delta, CD3 gamma or CD3 epsilon or a portion thereof a TCR. In some embodiments, the inhibitory intracellular domain is fused to the transmembrane domain of TCR alpha, TCR beta, CD3 delta, CD3 gamma or CD3 epsilon.

[0305] In some embodiments, the second engineered receptor is a TCR comprising an inhibitory domain (an inhibitory TCR). In some embodiments, the inhibitory domain is isolated or derived from LILRB1.

### LILRB1 Inhibitory Receptors

[0306] The disclosure provides a second, inhibitory receptor comprising a LILRB1 inhibitory domain, and optionally, a LILRB1 transmembrane and/or hinge domain, or functional variants thereof. The second, inhibitory receptor can be a CAR or TCR. The inclusion of the LILRB1 transmembrane domain and/or the LILRB1 hinge domain in the inhibitory receptor may increase the inhibitory signal generated by the inhibitory receptor compared to a reference inhibitory receptor having another transmembrane domain or another hinge domains. The second, inhibitory receptor comprising the LILRB1 inhibitory domain may be a CAR or TCR, as described herein. Any suitable ligand binding domain, as described herein, may be fused to the LILRB1-based second, inhibitory receptors.

[0307] Leukocyte immunoglobulin-like receptor subfamily B member 1 (LILRB1), also known as Leukocyte immunoglobulin-like receptor B1, as well as ILT2, LIR1, MIR7, PIRB, CD85J, ILT-2 LIR-1, MIR-7 and PIR-B, is a member of the leukocyte immunoglobulin-like receptor (LIR) family. The LILRB1 protein belongs to the subfamily B class of LIR receptors. These receptors contain two to four extracellular immunoglobulin domains, a transmembrane domain, and two to four cytoplasmic immunoreceptor tyrosine-based inhibitory motifs (ITIMs). The LILRB1 receptor is expressed on immune cells, where it binds to MHC class I molecules on antigen-presenting cells and transduces a negative signal that inhibits stimulation of an immune response. LILRB1 is thought to regulate inflammatory responses, as well as cytotoxicity, and to play a role in limiting auto-reactivity. Multiple transcript variants encoding different isoforms of LILRB1 exist, all of which are contemplated as within the scope of the instant disclosure.

[0308] In some embodiments of the inhibitory receptors described herein, the inhibitory receptor comprises one or more domains isolated or derived from LILRB1. In some embodiments of the receptors having one or more domains isolated or derived from LILRB1, the one or more domains of LILRB1 comprise an amino acid sequence that is at least 80%, at least 90%, at least 95%, at least 96%, at least 97%, at least 98%, at least 99% or is identical to a sequence or subsequence of SEQ ID NO: 65. In some embodiments, the one or more domains of LILRB1 comprise an amino acid sequence that is identical to a sequence or subsequence of SEQ ID NO: 65. In some embodiments, the one or more domains of LILRB1 consist of an amino acid sequence that is at least 80%, at least 90%, at least 95%, at least 96%, at least 97%, at least 98%, at least 99% or is identical to a sequence or subsequence of SEQ ID NO: 65. In some embodiments, the one or more domains of LILRB1 consist of an amino acid sequence that is identical to a sequence or subsequence of SEQ ID NO: 65.

[0309] In some embodiments of the receptors having one or more domains isolated or derived from LILRB1, the one or more domains of LILRB1 are encoded by a polynucleotide sequence that is at least 80%, at least 90%, at least 95%, at least 96%, at least 97%, at least 98%, at least 99% or is identical to a sequence or subsequence of SEQ ID NO: 66.

[0310] In some embodiments of the receptors having one or more domains of LILRB1, the one or more domains of LILRB1 are encoded by a polynucleotide sequence that is identical to a sequence or subsequence of SEQ ID NO: 66.

[0311] In various embodiments, an inhibitory receptor is provided, comprising a polypeptide, wherein the polypeptide comprises one or more of: an LILRB1 hinge domain or functional fragment or variant thereof; an LILRB1 transmembrane domain or a functional variant thereof; and an LILRB1 intracellular domain or an intracellular domain comprising at least one, or at least two immunoreceptor tyrosine-based inhibitory motifs (ITIMs), wherein each ITIM is independently selected from NLYAAV (SEQ ID NO: 67), VTYAEV (SEQ ID NO: 68), VTYAQL (SEQ ID NO: 69), and SIYATL (SEQ ID NO: 70).

[0312] As used herein an “immunoreceptor tyrosine-based inhibitory motif” or “ITIM” refers to a conserved sequence of amino acids with a consensus sequence of S/I/V/LxYxxI/V/L (SEQ ID NO: 274), or the like, that is found in the cytoplasmic tails of many inhibitory receptors of the immune system. After ITIM-possessing inhibitory receptors interact with their ligand, the ITIM motif is phosphorylated, allowing the inhibitory receptor to recruit other enzymes, such as the phosphotyrosine phosphatases SHP-1 and SHP-2, or the inositol-phosphatase called SHIP.

[0313] In some embodiments, the polypeptide comprises an intracellular domain comprising at least one immunoreceptor tyrosine-based inhibitory motif (ITIM), at least two ITIMs, at least 3 ITIMs, at least 4 ITIMs, at least 5 ITIMs or at least 6 ITIMs. In some embodiments, the intracellular domain has 1, 2, 3, 4, 5, or 6 ITIMs.

[0314] In some embodiments, the polypeptide comprises an intracellular domain comprising at least one ITIM selected from the group of ITIMs consisting of NLYAAV (SEQ ID NO: 67), VTYAEV (SEQ ID NO: 68), VTYAQL (SEQ ID NO: 69), and SIYATL (SEQ ID NO: 70).

[0315] In further particular embodiments, the polypeptide comprises an intracellular domain comprising at least two immunoreceptor tyrosine-based inhibitory motifs (ITIMs), wherein each ITIM is independently selected from NLYAAV (SEQ ID NO: 67), VTYAEV (SEQ ID NO: 68), VTYAQL (SEQ ID NO: 69), and SIYATL (SEQ ID NO: 70).

[0316] In some embodiments, the intracellular domain comprises both ITIMs NLYAAV (SEQ ID NO: 67) and VTYAEV (SEQ ID NO: 68). In some embodiments, the intracellular domain comprises a sequence at least 95% identical to SEQ ID NO: 71. In some embodiments, the intracellular domain comprises or consists essentially of a sequence identical to SEQ ID NO: 71.

[0317] In some embodiments, the intracellular domain comprises both ITIMs VTYAEV (SEQ ID NO: 68) and VTYAQL (SEQ ID NO: 69). In some embodiments, the intracellular domain comprises a sequence at least 95% identical to SEQ ID NO: 72. In some embodiments, the intracellular domain comprises or consists essentially of a sequence identical to SEQ ID NO: 72.

[0318] In some embodiments, the intracellular domain comprises both ITIMs VTYAQL (SEQ ID NO: 69) and SIYATL (SEQ ID NO: 70). In some embodiments, the intracellular domain comprises a sequence at least 95% identical to SEQ ID NO: 73. In some embodiments, the intracellular domain comprises or consists essentially of a sequence identical to SEQ ID NO: 73.

[0319] In some embodiments, the intracellular domain comprises the ITIMs NLYAAV (SEQ ID NO: 67), VTYAEV (SEQ ID NO: 68), and VTYAQL (SEQ ID NO: 69). In some embodiments, the intracellular domain comprises a sequence at least 95% identical to SEQ ID NO: 74. In some embodiments, the intracellular domain comprises or consists essentially of a sequence identical to SEQ ID NO: 74.

[0320] In some embodiments, the intracellular domain comprises the ITIMs VTYAEV (SEQ ID NO: 68), VTYAQL (SEQ ID NO: 69), and SIYATL (SEQ ID NO: 70). In some embodiments, the intracellular domain comprises a sequence at least 95% identical to SEQ ID NO: 75. In some embodiments, the intracellular domain comprises or consists essentially of a sequence identical to SEQ ID NO: 75.

[0321] In some embodiments, the intracellular domain comprises the ITIMs NLYAAV (SEQ ID NO: 67), VTYAEV (SEQ ID NO: 68), VTYAQL (SEQ ID NO: 69), and SIYATL (SEQ ID NO: 70). In embodiments, the intracellular domain comprises a sequence at least 95% identical to SEQ ID NO: 76. In some embodiments, the intracellular domain comprises or consists essentially of a sequence identical to SEQ ID NO: 76.

[0322] In some embodiments, the intracellular domain comprises a sequence at least 95% identical to the LILRB1 intracellular domain (SEQ ID NO: 81). In some embodiments, the intracellular domain comprises or consists essentially of a sequence identical to the LILRB1 intracellular domain (SEQ ID NO: 81).

[0323] LILRB1 intracellular domains or functional variants thereof of the disclosure can have at least 1, at least 2, at least 4, at least 4, at least 5, at least 6, at least 7, or at least 8 ITIMs. In some embodiments, the LILRB1 intracellular domain or functional variant thereof has 2, 3, 4, 5, or 6 ITIMs.

[0324] In particular embodiments, the intracellular domain comprises two, three, four, five, or six immunoreceptor tyrosine-based inhibitory motifs (ITIMs), wherein each ITIM is independently selected from NLYAAV (SEQ ID NO: 67), VTYAEV (SEQ ID NO: 68), VTYAQL (SEQ ID NO: 69), and SIYATL (SEQ ID NO: 70).

[0325] In particular embodiments, the intracellular domain comprises at least three immunoreceptor tyrosine-based inhibitory motifs (ITIMs), wherein each ITIM is independently selected from NLYAAV (SEQ ID NO: 67), VTYAEV (SEQ ID NO: 68), VTYAQL (SEQ ID NO: 69), and SIYATL (SEQ ID NO: 70).

[0326] In particular embodiments, the intracellular domain comprises three immunoreceptor tyrosine-based inhibitory motifs (ITIMs), wherein each ITIM is independently selected from NLYAAV (SEQ ID NO: 67), VTYAEV (SEQ ID NO: 68), VTYAQL (SEQ ID NO: 69), and SIYATL (SEQ ID NO: 70).

[0327] In particular embodiments, the intracellular domain comprises four immunoreceptor tyrosine-based inhibitory motifs (ITIMs), wherein each ITIM is independently selected from NLYAAV (SEQ ID NO: 67), VTYAEV (SEQ ID NO: 68), VTYAQL (SEQ ID NO: 69), and SIYATL (SEQ ID NO: 70).

[0328] In particular embodiments, the intracellular domain comprises five immunoreceptor tyrosine-based inhibitory motifs (ITIMs), wherein each ITIM is independently selected from NLYAAV (SEQ ID NO: 67), VTYAEV (SEQ ID NO: 68), VTYAQL (SEQ ID NO: 69), and SIYATL (SEQ ID NO: 70).

[0329] In particular embodiments, the intracellular domain comprises six immunoreceptor tyrosine-based inhibitory motifs (ITIMs), wherein each ITIM is independently selected from NLYAAV (SEQ ID NO: 67), VTYAEV (SEQ ID NO: 68), VTYAQL (SEQ ID NO: 69), and SIYATL (SEQ ID NO: 70).

[0330] In particular embodiments, the intracellular domain comprises at least seven immunoreceptor tyrosine-based inhibitory motifs (ITIMs), wherein each ITIM is independently selected from NLYAAV (SEQ ID NO: 67), VTYAEV (SEQ ID NO: 68), VTYAQL (SEQ ID NO: 69), and SIYATL (SEQ ID NO: 70).

[0331] The LILRB1 protein has four immunoglobulin (Ig) like domains termed D1, D2, D3 and D4. In some embodiments, the LILRB1 hinge domain comprises an LILRB1 D3D4 domain or a functional variant thereof. In some embodiments, the LILRB1 D3D4 domain comprises a sequence at least 95%, at least 96%, at least 97%, at least 98%, at least 99% or identical to SEQ ID NO: 77. In some embodiments, the LILRB1 D3D4 domain comprises or consists essentially of SEQ ID NO: 77.

[0332] In some embodiments, the polypeptide comprises the LILRB1 hinge domain or functional fragment or variant thereof. In embodiments, the LILRB1 hinge domain or functional fragment or variant thereof comprises a sequence at least 95%, at least 96%, at least 97%, at least 98%, at least 99% identical or identical to SEQ ID NO: 84, SEQ ID NO: 77, or SEQ ID NO: 78. In embodiments, the LILRB1 hinge domain or functional fragment or variant thereof comprises a sequence at least 95% identical to SEQ ID NO: 84, SEQ ID NO: 77, or SEQ ID NO: 78.

[0333] In some embodiments, the LILRB1 hinge domain comprises a sequence identical to SEQ ID NO: 84, SEQ ID NO: 77, or SEQ ID NO: 78.

[0334] In some embodiments, the LILRB1 hinge domain consists essentially of a sequence identical to SEQ ID NO: 84, SEQ ID NO: 77, or SEQ ID NO: 78.

[0335] In some embodiments, the transmembrane domain is a LILRB1 transmembrane domain or a functional variant thereof. In some embodiments, the LLRB1 transmembrane domain or a functional variant thereof comprises a sequence at least 95% identical, at least 96% identical, at least 97% identical, at least 98% identical or at least 99% to SEQ ID NO: 85. In some embodiments, the LILRB1 transmembrane domain or a functional variant thereof comprises a sequence at least 95% identical to SEQ ID NO: 85. In some embodiments, the LILRB1 transmembrane domain comprises a sequence identical to SEQ ID NO: 85. In embodiments, the LILRB1 transmembrane domain consists essentially of a sequence identical to SEQ ID NO: 85.

[0336] In some embodiments, the transmembrane domain can be attached to the extracellular region of the second, inhibitory receptor, e.g., the antigen binding domain or ligand binding domain, via a hinge, e.g., a hinge from a human protein. For example, in some embodiments, the hinge can be a human immunoglobulin (Ig) hinge, e.g., an IgG4 hinge, a CD8α hinge or an LILRB1 hinge.

[0337] In some embodiments, the second, inhibitory receptor comprises an inhibitory domain. In some embodiments, the second, inhibitory receptor comprises an inhibitory intracellular domain and/or an inhibitory transmembrane domain. In some embodiments, the inhibitory domain is isolated or derived from LILR1B.

### Inhibitory Receptors Comprising Combinations of LILRB1 Domains

[0338] In some embodiments, the LLRB1-based inhibitory receptors of the disclosure comprise more than one LILRB1 domain or functional equivalent thereof. For example, in some embodiments, the inhibitory receptor comprises an LILRB1 transmembrane domain and intracellular domain, or an LILRB1 hinge domain, transmembrane domain and intracellular domain.

[0339] In particular embodiments, the inhibitory receptor comprises an LILRB1 hinge domain or functional fragment or variant thereof, and the LILRB1 transmembrane domain or a functional variant thereof. In some embodiments, the polypeptide comprises a sequence at least 95% identical, at least 96% identical, at least 97% identical, at least 98% identical, at least 99% identical or identical to SEQ ID NO: 79. In some embodiments, the polypeptide comprises a sequence at least 95% identical to SEQ ID NO: 79. In some embodiments, the polypeptide comprises a sequence identical to SEQ ID NO: 79.

[0340] In further embodiments, the inhibitory receptor comprises: the LILRB1 transmembrane domain or a functional variant thereof, and an LILRB1 intracellular domain and/or an intracellular domain comprising at least one immunoreceptor tyrosine-based inhibitory motif (ITIM), wherein the ITIM is selected from NLYAAV (SEQ ID NO: 67), VTYAEV (SEQ ID NO: 68), VTYAQL (SEQ ID NO: 69), and SIYATL (SEQ ID NO: 70). In some embodiments, the polypeptide comprises the LILRB1 transmembrane domain or a functional variant thereof, and an LILRB1 intracellular domain and/or an intracellular domain comprising at least two ITIM, wherein each ITIM is independently selected from NLYAAV (SEQ ID NO: 67), VTYAEV (SEQ ID NO: 68), VTYAQL (SEQ ID NO: 69), and SIYATL (SEQ ID NO: 70).

[0341] In some embodiments, the inhibitory receptor comprises a LILRB1 transmembrane domain and intracellular domain. In some embodiments, the polypeptide comprises a sequence at least 95% identical, at least 96% identical, at least 97% identical, at least 98% identical, at least 99% identical or identical to SEQ ID NO: 80. In some embodiments, the polypeptide comprises a sequence at least 95% identical to SEQ ID NO: 80. In some embodiments, the polypeptide comprises a sequence identical to SEQ ID NO: 80. In some embodiments, the inhibitory receptor comprises the LILRB1 transmembrane domain and intracellular domain of SEQ ID NO: 80 fused to an extracellular ligand binding domain. In some embodiments, the inhibitory receptor comprises a first polypeptide comprising SEQ ID NO: 80 fused to a TCR alpha variable domain, and a second polypeptide comprising SEQ ID NO: 80 fused to a TCR beta variable domain.

[0342] In preferred embodiments, the inhibitory receptor comprises: an LILRB1 hinge domain or functional fragment or variant thereof, an LILRB1 transmembrane domain or a functional variant thereof; and an LILRB1 intracellular domain and/or an intracellular domain comprising at least two immunoreceptor tyrosine-based inhibitory motifs (ITIMs), wherein each ITIM is independently selected from LYAAV (SEQ ID NO: 67), VTYAE (SEQ ID NO: 68), VTYAQL (SEQ ID NO: 69), and SIYATL (SEQ ID NO: 11).

[0343] In some embodiments, the inhibitory receptor comprises a sequence at least 95% identical to SEQ ID NO: 82 or SEQ ID NO: 83, or at least 99% identical to SEQ ID NO: 82 or SEQ ID NO: 83, or identical to SEQ ID NO: 82 or SEQ ID NO: 83.

[0344] In some embodiments, the polypeptide comprises a sequence at least 99% identical to SEQ ID NO: 79, or at least 99% identical to SEQ ID NO: 79, or identical to SEQ ID NO: 79.

[0345] In some embodiments, the polypeptide comprises a sequence at least 99% identical to SEQ ID NO: 80, or at least 99% identical to SEQ ID NO: 80, or identical to SEQ ID NO: 80.

TABLE 13
Polypeptide sequences for illustrative LILRB1-based inhibitory receptors

| Name | Sequence |
|---|---|
| LILRB1 | MTPILTVLICLGLSLGPRTHVQAGHLPKPTLWAEPGSVITQGSPVTLRCQ |
| | GGQETQEYRLYREKKTALWITRIPQELVKKGQFPIPSITWEHAGRYRCYY |
| | GSDTAGRSESSDPLELVVTGAYIKPTLSAQPSPVVNSGGNVILQCDSQV |
| | AFDGFSLCKEGEDEHPQCLNSQPHARGSSRAIFSVGPVSPSRRWWYRC |
| | YAYDSNSPYEWSLPSDLLELLVLGVSKKPSLSVQPGPIVAPEETLTLQCGS |
| | DAGYNRFVLYKDGERDFLQLAGAQPQAGLSQANFTLGPVSRSYGGQY |
| | RCYGAHNLSSEWSAPSDPLDILIAGQFYDRVSLSVQPGPTVASGENVTLL |
| | CQSQGWMQTFLLTKEGAADDPWRLRSTYQSQKYQAEFPMGPVTSAH |
| | AGTYRCYGSQSSKPYLLTHPSDPLELVVSGPSGGPSSPTTGPTSTSGPED |
| | QPLTPTGSDPQSGLGRHLGVVIGILVAVILLLLLLLLLFLILRHRRQGKHW |
| | TSTQRKADFQHPAGAVGPEPTDRGLQWRSSPAADAQEENLYAAVKHT |
| | QPEDGVEMDTRSPHDEDPQAVTYAEVKHSRPRREMASPPSPLSGEFL |
| | DTKDRQAEEDRQMDTEAAASEAPQDVTYAQLHSLTLRREATEPPPSQE |
| | GPSPAVPSIYATLAIH |
| | SEQ ID NO: 65 |
| LILRB1 hinge- | YGSQSSKPYLLTHPSDPLELVVSGPSGGPSSPTTGPTSTSGPEDQPLTPT |
| transmembrane- | GSDPQSGLGRHLGVVIGILVAVILLLLLLLLLFLILRHRRQGKHWTSTQRK |
| intracellular domain | ADFQHPAGAVGPEPTDRGLQWRSSPAADAQEENLYAAVKHTQPEDG |
| | VEMDTRSPHDEDPQAVTYAEVKHSRPRREMASPPSPLSGEFLDTKDRQ |
| | AEEDRQMDTEAAASEAPQDVTYAQLHSLTLRREATEPPPSQEGPSPAV |
| | PSIYATLAIH |
| | SEQ ID NO: 82 |
| LILRB1 hinge- | VVSGPSGGPSSPTTGPTSTSGPEDQPLTPTGSDPQSGLGRHLGVVIGILV |
| transmembrane- | AVILLLLLLLLLFLILRHRRQGKHWTSTQRKADFQHPAGAVGPEPTDRGL |
| intracellular domain (w/o | QWRSSPAADAQEENLYAAVKHTQPEDGVEMDTRSPHDEDPQAVTYA |
| YGSQSSKPYLLTHPSDPLEL) | EVKHSRPRREMASPPSPLSGEFLDTKDRQAEEDRQMDTEAAASEAPQ |
| | DVTYAQLHSLTLRREATEPPPSQEGPSPAVPSIYATLAIH |
| | SEQ ID NO: 83 |
| LILRB1 hinge domain | YGSQSSKPYLLTHPSDPLELVVSGPSGGPSSPTTGPTSTSGPEDQPLTPT |
| | GSDPQSGLGRHLG |
| | SEQ ID NO: 84 |
| LILRB1 transmembrane | VVIGILVAVILLLLLLLLLFLIL |
| domain | SEQ ID NO: 85 |
| LILRB1 intracellular | RHRRQGKHWTSTQRKADFQHPAGAVGPEPTDRGLQWRSSPAADAQ |
| domain | EENLYAAVKHTQPEDGVEMDTRSPHDEDPQAVTYAEVKHSRPRREMA |
| | SPPSPLSGEFLDTKDRQAEEDRQMDTEAAASEAPQDVTYAQLHSLTLRR |
| | EATEPPPSQEGPSPAVPSIYATLAIH |
| | SEQ ID NO: 81 |
| ITIM1 | NLYAAV |
| | SEQ ID NO: 67 |
| ITIM2 | VTYAEV |
| | SEQ ID NO: 68 |
| ITIM3 | VTYAQL |
| | SEQ ID NO: 69 |
| ITIM4 | SIYATL |
| | SEQ ID NO: 70 |
| ITIM1-2 | NLYAAVKHTQPEDGVEMDTRSPHDEDPQAVTYAEV |
| | SEQ ID NO: 71 |
| ITIM2-3 | VTYAEVKHSRPRREMASPPSPLSGEFLDTKDRQAEEDRQMDTEAAASE |
| | APQDVTYAQL |
| | SEQ ID NO: 72 |
| ITIM3-4 | VTYAQLHSLTLRREATEPPPSQEGPSPAVPSIYATL |
| | SEQ ID NO: 73 |
| ITIM1-3 | NLYAAVKHTQPEDGVEMDTRSPHDEDPQAVTYAEVKHSRPRREMAS |
| | PPSPLSGEFLDTKDRQAEEDRQMDTEAAASEAPQDVTYAQL |
| | SEQ ID NO: 74 |
| ITIM2-4 | VTYAEVKHSRPRREMASPPSPLSGEFLDTKDRQAEEDRQMDTEAAASE |
| | APQDVTYAQLHSLTLRREATEPPPSQEGPSPAVPSIYATL |
| | SEQ ID NO: 75 |
| ITIM1-4 | NLYAAVKHTQPEDGVEMDTRSPHDEDPQAVTYAEVKHSRPRREMAS |
| | PPSPLSGEFLDTKDRQAEEDRQMDTEAAASEAPQDVTYAQLHSLTLRR |
| | EATEPPPSQEGPSPAVPSIYATL |
| | SEQ ID NO: 76 |
| D3D4 domain | YGSQSSKPYLLTHPSDPLEL |
| | SEQ ID NO: 77 |
| Short hinge | VVSGPSGGPSSPTTGPTSTSGPEDQPLTPTGSDPQSGLGRHLG |
| | SEQ ID NO: 78 |
| Hinge (iTIM hinge) | YGSQSSKPYLLTHPSDPLELVVSGPSGGPSSPTTGPTSTSGPEDQPLTPT |
| | GSDPQSGLGRHLGV (SEQ ID NO: 8820) |
| Short hinge 2 | VVSGPSGGPSSPTTGPTSTSGPEDQPLTPTGSDPQSGLGRHLGV (SEQ |
| | ID NO: 8821) |
| Long hinge 1 | AGSGGSGGSGGSPVPSTPPTPSPSTPPTPSPSGGSGNSSGSGGSPVPST |
| | PPTPSPSTPPTPSPSASV (SEQ ID NO: 8822) |
| Long hinge 2 | AGSGGSGGSGGSPVPSTPPTNSSSTPPTPSPSPVPSTPPTNSSSTPPTPS |
| | PSPVPSTPPTNSSSTPPTPSPSASV (SEQ ID NO: 8823) |
| 2x Short hinge | VVSGPSGGPSSPTTGPTSTSGPEDQPLTPTGSDPQSGLGRHVVSGPSG |
| | GPSSPTTGPTSTSGPEDQPLTPTGSDPQSGLGRHLGV (SEQ ID NO: |
| | 8824) |
| Hinge (truncated) | TTGPTSTSGPEDQPLTPTGSDPQSGLGRHLGV (SEQ ID NO: 8825) |
| Hinge-transmembrane | YGSQSSKPYLLTHPSDPLELVVSGPSGGPSSPTTGPTSTSGPEDQPLTPT |
| | GSDPQSGLGRHLGVVIGILVAVILLLLLLLLLFLIL |
| | SEQ ID NO: 79 |
| Transmembrane- | VVIGILVAVILLLLLLLLLFLILRHRRQGKHWTSTQRKADFQHPAGAVGP |
| intracellular domain. | EPTDRGLQWRSSPAADAQEENLYAAVKHTQPEDGVEMDTRSPHDED |
| | PQAVTYAEVKHSRPRREMASPPSPLSGEFLDTKDRQAEEDRQMDTEAA |
| | ASEAPQDVTYAQLHSLTLRREATEPPPSQEGPSPAVPSIYATLAIH |
| | SEQ ID NO: 80 |

### Linkers

[0346] In some embodiments, the engineered receptors comprise a linker linking two domains of the engineered receptor. Provided herein are linkers that, in some embodiments, can be used to link domains of the engineered receptors described herein.

[0347] The terms “linker” and “flexible polypeptide linker” as used in the context of linking protein domains, for example intracellular domains or domains within an scFv, refers to a peptide linker that consists of amino acids such as glycine and/or serine residues used alone or in combination, to link two domains together.

[0348] Any linker may be used and many fusion protein linker formats are known. For example, the linker may be flexible or rigid. Non-limiting examples of rigid and flexible linkers are provided in Chen et al. (Adv Drug Deliv Rev. 2013; 65(10):1357-1369).

[0349] The antigen-binding domains described herein may be linked to each other in a random or specified order.

[0350] The antigen-binding domains described herein may be linked to each other in any orientation of N to C terminus.

[0351] Optionally, a short oligo- or polypeptide linker, for example, between 2 and 40 amino acids (e.g., 2, 3, 4, 5, 6, 7, 8, 9, or 10 amino acids) in length may form the linkage between the domains.

[0352] In some embodiments, the linker is a peptide of 1, 2, 3, 4, 5, 6, 7, 8, 9, 10, 11, 12, 13, 14, 15, 16, 17, 18, 19, 20, 21, 22, 23, 24, 25, 26, 27, 28, 29, 30 or more than 30 amino acid residues. Non-limiting examples of amino acids found in linkers include Gly, Ser, Glu, Gin, Ala, Leu, Iso, Lys, Arg, Pro, and the like. In some embodiments, the linker is [(Gly)n1Ser]n2, where n1 and n2 may be any number (e.g. n1 and n2 may independently be 1, 2, 4, 5, 6, 7, 8, 9, 10 or more than 10). In some embodiments, n1 is 4.

[0353] In some embodiments, the flexible polypeptide linker is a Gly/Ser linker and comprises the amino acid sequence (Gly-Gly-Ser), (Gly-Gly-Gly-Ser, SEQ ID NO: 231), or (Gly-Gly-Gly-Gly-Ser, SEQ ID NO: 226) which can be repeated n times, where n is a positive integer equal to or greater than 1. For example, n=1, n=2, n=3, n=4, n=5, n=6, n=7, n=8, n=9 and n=10. In some embodiments, the flexible polypeptide linkers include, but are not limited to, GGS, GGGGS (SEQ ID NO: 226), GGGGS GGGGS (SEQ ID NO: 227), GGGGS GGGGS GGGGS (SEQ ID NO: 228), GGGGS GGGGS GGGGS GG (SEQ ID NO: 229) or GGGGS GGGGS GGGGS GGGGS (SEQ ID NO: 230).

[0354] In some embodiments, the linkers include multiple repeats of (Gly Gly Ser), (Gly Ser) or (Gly Gly Gly Ser (SEQ ID NO: 231)). Also included within the scope of the invention are linkers described in WO2012/138475 (incorporated herein by reference).

[0355] In some embodiments, the linker sequence comprises a long linker (LL) sequence. In some embodiments, the long linker sequence comprises GGGGS (SEQ ID NO: 226), repeated four times. In some embodiments, a GGGGS GGGGS GGGGS GGGGS (SEQ ID NO: 230) is used to link intracellular domains in a TCR alpha fusion protein of the disclosure.

[0356] In some embodiments, the long linker sequence comprises GGGGS (SEQ ID NO: 226), repeated three times. In some embodiments, a GGGGS GGGGS GGGGS (SEQ ID NO: 228) is used to link intracellular domains in a TCR beta fusion protein of the disclosure.

[0357] In some embodiments, the linker sequence comprises a short linker (SL) sequence. In some embodiments, the short linker sequence comprises GGGGS (SEQ ID NO: 226).

[0358] In some embodiments, a glycine-serine doublet can be used as a suitable linker.

[0359] In some embodiments, domains are fused directly to each other via peptide bonds without use of a linker.

[0360] Additional antigen binding domains, activator and inhibitor targets, and receptors, and uses thereof, are described in WO2021/030149, published Feb. 18, 2021, WO2021/173674, published Aug. 2, 2021, WO2021/119489, published Jun. 17, 2021, WO2021/222576, published Nov. 4, 2021, WO2021/252635, published Dec. 16, 2021, WO2022/036065, published Mar. 17, 2022, WO2022/040454, published Feb. 24, 2022, WO2022/040444, published Feb. 24, 2022, WO2022/040470, published Feb. 24, 2022, and WO2021/096868, published May 20, 2021, the contents of each of which are incorporated by reference herein in their entireties.

### Assays

[0361] Provided herein are assays that can be used to measure the activity of the engineered receptors of the disclosure.

[0362] The activity of engineered receptors can be assayed using a cell line engineered to express a reporter of receptor activity such as a luciferase reporter. Exemplary cell lines include Jurkat T cells, although any suitable cell line known in the art may be used. For example, Jurkat cells expressing a luciferase reporter under the control of an NFAT promoter can be used as effector cells. Expression of luciferase by this cell line reflects TCR-mediated signaling.

[0363] The reporter cells can be transfected with each of the various fusion protein constructs, combinations of fusion protein constructs or controls described herein.

[0364] Expression of the fusion proteins in reporter cells can be confirmed by using fluorescently labeled MHC tetramers, for example Alexa Fluor 647-labeled NY-ESO-1-MHC tetramer, to detect expression of the fusion protein.

[0365] To assay the activity of engineered receptors, target cells are loaded with antigen prior to exposure to the effector cells comprising the reporter and the engineered receptor. For example, target cells can be loaded with antigen at least 12, 14, 16, 18, 20, 22 or 24 hours prior to exposure to effector cells. Exemplary target cells include A375 cells, although any suitable cells known in the art may be used. In some cases, target cells can be loaded with serially diluted concentrations of an antigen, such as NY-ESO-1 peptide. The effector cells can then be co-cultured with target cells for a suitable period of time, for example 6 hours. Luciferase is then measured by luminescence reading after co-culture. Luciferase luminescence can be normalized to maximum and minimum intensity to allow comparison of activating peptide concentrations for each engineered receptor construct.

[0366] Provided herein are methods of determining the relative EC50 of engineered receptors of the disclosure. As used herein, “EC50” refers to the concentration of an inhibitor or agent where the response (or binding) is reduced by half. EC50s of engineered receptors of the disclosure refer to concentration of antigen where binding of the engineered receptor to the antigen is reduced by half. Binding of the antigen, or probe to the engineered receptor can be measured by staining with labeled peptide or labeled peptide-MHC complex, for example MHC:NY-ESO-1 pMHC complex conjugated with fluorophore. EC50 can be obtained by nonlinear regression curve fitting of reporter signal with peptide titration. Probe binding and EC50 can be normalized to the levels of benchmark TCR without a fusion protein, e.g. NY-ESO-1 (clone 1G4).

### Polynucleotides

[0367] The disclosure provides polynucleotides comprising the sequence(s) of the interfering RNA described herein. In some embodiments, the polynucleotides comprise the shRNA described herein. In some embodiments, the shRNA comprises a first sequence, having from 5′ end to 3′ end a sequence complementary to an HLA-A*02 mRNA; and a second sequence, having from 5′ end to 3′ end a sequence complementary to the first sequence. In some embodiments, the HLA-A*02 mRNA sequence comprises a coding sequence. In some embodiments, the HLA-A*02 mRNA sequence comprises an untranslated region. In some embodiments, the first and second sequence are present on a polynucleotide, wherein the first sequence and the second sequence are separated by 4, 5, 6, 7, 8, 9, 10, 11, 12, 13, 14, or 15 nucleotides, wherein the 4, 5, 6, 7, 8, 9, 10, 11, 12, 13, 14, or 15 nucleotides form a loop region in the shRNA. In some embodiments, the shRNA further comprises a 5′ flank sequence and a 3′ flank sequence, wherein the 5′ flank sequence is joined to the 5′ end of the first sequence, and wherein the 3′ flank sequence is joined to the 3′ end of the second sequence.

[0368] In some embodiments, the polynucleotide encoding an shRNA has from 5′ end to 3′ end, a 5′ flank sequence, a first sequence, a loop sequence, a second sequence, a 3′ flank sequence. In some embodiments, the polynucleotide encoding an shRNA has from 5′ end to 3′ end, a 5′ flank sequence, a second sequence, a loop sequence, a first sequence, and a 3′ flank sequence.

[0369] In some embodiments, the first sequences is 18, 19, 20, 21, or 22 nucleotides. In some embodiments, the first sequence is complementary to a sequence selected from SEQ ID NOs: 400-8794. In some embodiments, the first sequence has GC content greater than or equal to 25% and less than 60%. In some embodiments, the first sequence is complementary to a sequence selected from SEQ ID NOs: 400-3990. In some embodiments, the first sequence does not comprise four nucleotides of the same base or a run of seven C or G nucleotide bases. In some embodiments, the first sequence is complementary to a sequence selected from SEQ ID NOs: 400-3508. In some embodiments, the first sequence is complementary to a sequence selected from SEQ ID NOs: 400-678. In some embodiments, the first sequence is complementary to a sequence selected from SEQ ID NOs: 400-485. Illustrative target HLA sequences complementary to the first sequence are shown in Table 2.

[0370] In some embodiments, the polynucleotide encoding an shRNA further comprises a promoter sequence and a terminator sequence. In some embodiments, the shRNA is operably linked to the promoter. In some embodiments, the polynucleotide has from 5′ end to 3′ end, a promoter sequence, a 5′ flank sequence, a first sequence, a loop sequence, a second sequence, a 3′ flank sequence, and a terminator. In some embodiments, the polynucleotide encodes, from 5′ end to 3′ end, a promoter sequence, a 5′ flank sequence, a second sequence, a loop sequence, a first sequence, a 3′ flank sequence, and a terminator sequence.

[0371] In some embodiments, the polynucleotides comprise a promoter operably linked to the shRNA, such as a mammalian, viral or synthetic promoter. In some embodiments, the promoter sequence is a U6 promoter sequence. In some embodiments, the promoter sequence shares at least 80%, at least 85%, at least 90%, at least 95%, at least 98%, at least 99% identity to SEQ ID NO: 8826. In some embodiments, the promoter sequence is SEQ ID NO: 8826. In some embodiments, the promoter sequence is a H1 promoter sequence. In some embodiments, the promoter sequence shares at least 80%, at least 85%, at least 90%, at least 95%, at least 98%, at least 99% identity to SEQ ID NO: 8827. In some embodiments, the promoter sequence is SEQ ID NO: 8827. In some embodiments, the promoter sequence is a 7SK promoter sequence. In some embodiments, the promoter sequence shares at least 80%, at least 85%, at least 90%, at least 95%, at least 98%, at least 99% identity to SEQ ID NO: 8828. In some embodiments, the promoter sequence is SEQ ID NO: 8828. In some embodiments, the promoter sequence is a Ef1a promoter sequence. In some embodiments, the promoter sequence shares at least 80%, at least 85%, at least 90%, at least 95%, at least 98%, at least 99% identity to SEQ ID NO: 8829. In some embodiments, the promoter sequence is SEQ ID NO: 8829. Illustrative promoter sequences are shown in Table 14.

TABLE 14
Illustrative promoter sequences

| Promoter | SEQ ID NO |
|---|---|
| U6 Promoter | 8826 |
| H1 Promoter | 8827 |
| 7SK Promoter | 8828 |
| Ef1a Promoter | 8829 |

### Vectors

[0372] The disclosure provides vectors comprising the polynucleotides described herein.

[0373] The disclosure provides vectors encoding the interfering RNA described herein. In some embodiments, the vectors encode the shRNA described herein. In some embodiments, the shRNA comprises a first sequence, having from 5′ end to 3′ end a sequence complementary to the HLA-A*02 mRNA; and a second sequence, having from 5′ end to 3′ end a sequence complementary to the first sequence. In some embodiments, the first and second sequence are present on a polynucleotide, wherein the first sequence and the second sequence are separated by 4, 5, 6, 7, 8, 9, 10, 11, 12, 13, 14, or 15 nucleotides, wherein the 4, 5, 6, 7, 8, 9, 10, 11, 12, 13, 14, or 15 nucleotides form a loop region in the shRNA. In some embodiments, the shRNA further comprises a 5′ flank sequence and a 3′ flank sequence, wherein the 5′ flank sequence is joined to the 5′ end of the first sequence, and wherein the 3′ flank sequence is joined to the 3′ end of the second sequence.

[0374] In some embodiments, the vectors encoding an shRNA has from 5′ end to 3′ end, a 5′ flank sequence, a first sequence, a loop sequence, a second sequence, a 3′ flank sequence. In some embodiments, the vectors encode, from 5′ end to 3′ end, and a 3′ flank sequence. In some embodiments, the vectors encode an shRNA has from 5′ end to 3′ end, a 5′ flank sequence, a second sequence, a loop sequence, a first sequence, and a 3′ flank sequence.

[0375] In some embodiments, the vectors encoding an shRNA further comprises a promoter sequence and a terminator sequence. In some embodiments, the shRNA is operably linked to the promoter. In some embodiments, the vector has from 5′ end to 3′ end, a promoter sequence, a 5′ flank sequence, a first sequence, a loop sequence, a second sequence, a 3′ flank sequence, and a terminator. In some embodiments, the vector has from 5′ end to 3′ end, a promoter sequence, a 5′ flank sequence, a second sequence, a loop sequence, a first sequence, a 3′ flank sequence, and a terminator sequence.

[0376] In some embodiments of the vectors of the disclosure, the promoter sequence is a U6 promoter sequence. In some embodiments, the promoter sequence shares at least 80%, at least 85%, at least 90%, at least 95%, at least 98%, at least 99% identity to SEQ ID NO: 8826. In some embodiments, the promoter sequence is SEQ ID NO: 8826. In some embodiments, the promoter sequence is a H1 promoter sequence. In some embodiments, the promoter sequence shares at least 80%, at least 85%, at least 90%, at least 95%, at least 98%, at least 99% identity to SEQ ID NO: 8827. In some embodiments, the promoter sequence is SEQ ID NO: 8827. In some embodiments, the promoter sequence is a 7SK promoter sequence. In some embodiments, the promoter sequence shares at least 80%, at least 85%, at least 90%, at least 95%, at least 98%, at least 99% identity to SEQ ID NO: 8828. In some embodiments, the promoter sequence is SEQ ID NO: 8828. In some embodiments, the promoter sequence is a Ef1a promoter sequence. In some embodiments, the promoter sequence shares at least 80%, at least 85%, at least 90%, at least 95%, at least 98%, at least 99% identity to SEQ ID NO: 8829. In some embodiments, the promoter sequence is SEQ ID NO: 8829. Illustrative promoter sequences are shown in Table 14.

[0377] In some embodiments, the vector described herein is a viral vector. In some embodiments, the vector is a lentiviral vector.

[0378] The disclosure provides vectors encoding an interfering RNA described herein and an inhibitory receptor. In some embodiments, the vector comprises an shRNA described herein and a polynucleotide encoding an inhibitor receptor comprising a ligand binding domain specific to a class I major histocompatibility complex (MHC-I) molecule, or a peptide-MHC complex thereof.

[0379] The disclosure provides polynucleotides encoding the sequence(s) of the activator and inhibitory receptors described herein.

[0380] In some embodiments, the sequence of the first and/or second receptor, or a fusion protein of the first and/or second receptor is operably linked to a promoter. In some embodiments, the sequence encoding the activator receptor, or a polypeptide thereof, is operably linked to a first promoter, and the sequence encoding a inhibitory receptor, or a fusion protein thereof, is operably linked to a second promoter.

[0381] The disclosure provides vectors comprising the polynucleotides described herein.

[0382] The disclosure provides vectors encoding the coding sequence or sequences of any of the receptors described herein. In some embodiments, the sequence of the first and/or second fusion protein is operably linked to a promoter. In some embodiments, the sequence encoding the first fusion protein is operably linked to a first promoter, and the sequence encoding a second fusion protein is operably linked to a second promoter.

[0383] In some embodiments, the first engineered receptor is encoded by a first vector and the second engineered receptor is encoded by second vector. In some embodiments, both engineered receptors are encoded by a single vector.

[0384] In some embodiments, the first and second receptors are encoded by a single vector. Methods of encoding multiple polypeptides using a single vector will be known to persons of ordinary skill in the art, and include, inter alia, encoding multiple polypeptides under control of different promoters, or, if a single promoter is used to control transcription of multiple polypeptides, use of sequences encoding internal ribosome entry sites (IRES) and/or self-cleaving peptides. Exemplary self-cleaving peptides include T2A, P2A, E2A and F2A self-cleaving peptides. In some embodiments, the T2A self-cleaving peptide comprises a sequence of EGRGSLLTCGDVEENPGP (SEQ ID NO: 271). In some embodiments, the P2A self-cleaving peptide comprises a sequence of ATNFSLLKQAGDVEENPGP (SEQ ID NO: 192). In some embodiments, the E2A self-cleaving peptide comprises a sequence of QCTNYALLKLAGDVESNPGP (SEQ ID NO: 272). In some embodiments, the F2A self-cleaving peptide comprises a sequence of VKQTLNFDLLKLAGDVESNPGP (SEQ ID NO: 273).

[0385] The disclosure provides polynucleotides encoding the gene editing systems described herein.

[0386] In some embodiments, the vector is an expression vector, i.e. for the expression of the fusion protein in a suitable cell.

[0387] Vectors derived from retroviruses such as the lentivirus are suitable tools to achieve long-term gene transfer since they allow long-term, stable integration of a transgene and its propagation in daughter cells. Lentiviral vectors have the added advantage over vectors derived from onco-retroviruses such as murine leukemia viruses in that they can transduce non-proliferating cells, such as hepatocytes. They also have the added advantage of low immunogenicity.

[0388] The expression of natural or synthetic nucleic acids encoding fusion proteins is typically achieved by operably linking a nucleic acid encoding the fusion protein or portions thereof to a promoter, and incorporating the construct into an expression vector. The vectors can be suitable for replication and integration eukaryotes. Typical cloning vectors contain transcription and translation terminators, initiation sequences, and promoters useful for regulation of the expression of the desired nucleic acid sequence.

[0389] The polynucleotides encoding the fusion proteins can be cloned into a number of types of vectors. For example, the polynucleotides can be cloned into a vector including, but not limited to a plasmid, a phagemid, a phage derivative, an animal virus, and a cosmid. Vectors of particular interest include expression vectors, replication vectors, probe generation vectors, and sequencing vectors.

[0390] Further, the expression vector may be provided to cells, such as immune cells, in the form of a viral vector. Viral vector technology is well known in the art and is described, for example, in Sambrook et al. (2001, Molecular Cloning: A Laboratory Manual, Cold Spring Harbor Laboratory, New York), and in other virology and molecular biology manuals. Viruses, which are useful as vectors include, but are not limited to, retroviruses, adenoviruses, adeno-associated viruses, herpes viruses, and lentiviruses. In general, a suitable vector contains an origin of replication function in at least one organism, a promoter sequence, convenient restriction endonuclease sites, and one or more selectable markers, (e.g., WO 01/96584; WO 01/29058; and U.S. Pat. No. 6,326,193).

[0391] A number of viral based systems have been developed for gene transfer into mammalian cells. For example, retroviruses provide a convenient platform for gene delivery systems. A selected gene can be inserted into a vector and packaged in retroviral particles using techniques known in the art. The recombinant virus can then be isolated and delivered to cells of the subject either in vivo or ex vivo. A number of retroviral systems are known in the art. In some embodiments, adenovirus vectors are used. A number of adenovirus vectors are known in the art. In one embodiment, lentivirus vectors are used.

[0392] Additional promoter elements, e.g., enhancers, regulate the frequency of transcriptional initiation. Typically, these are located in the region 30-110 basepairs (bp) upstream of the start site, although a number of promoters have recently been shown to contain functional elements downstream of the start site as well. The spacing between promoter elements frequently is flexible, so that promoter function is preserved when elements are inverted or moved relative to one another. In the thymidine kinase (tk) promoter, the spacing between promoter elements can be increased to 50 bp apart before activity begins to decline. Depending on the promoter, it appears that individual elements can function either cooperatively or independently to activate transcription.

[0393] One example of a suitable promoter is the immediate early cytomegalovirus (CMV) promoter sequence. This promoter sequence is a strong constitutive promoter sequence capable of driving high levels of expression of any polynucleotide sequence operatively linked thereto. Another example of a suitable promoter is Elongation Growth Factor-1α (EF-1α, Ef1α). However, other constitutive promoter sequences may also be used, including, but not limited to the simian virus 40 (SV40) early promoter, mouse mammary tumor virus (MMTV), human immunodeficiency virus (HIV) long terminal repeat (LTR) promoter, MoMuLV promoter, an avian leukemia virus promoter, an Epstein-Barr virus immediate early promoter, a Rous sarcoma virus promoter, as well as human gene promoters such as, but not limited to, the actin promoter, the myosin promoter, the hemoglobin promoter, and the creatine kinase promoter. Further, the invention should not be limited to the use of constitutive promoters. Inducible promoters are also contemplated as part of the invention. The use of an inducible promoter provides a molecular switch capable of turning on expression of the polynucleotide sequence which it is operatively linked when such expression is desired, or turning off the expression when expression is not desired. Examples of inducible promoters include, but are not limited to a metallothionine promoter, a glucocorticoid promoter, a progesterone promoter, and a tetracycline promoter.

[0394] In order to assess the expression of a fusion protein, the expression vector to be introduced into a cell can also contain either a selectable marker gene or a reporter gene or both to facilitate identification and selection of expressing cells from the population of cells sought to be transfected or infected through viral vectors. In other aspects, the selectable marker may be carried on a separate piece of DNA and used in a co-transfection procedure. Both selectable markers and reporter genes may be flanked with appropriate regulatory sequences to enable expression in the host cells. Useful selectable markers include, for example, antibiotic-resistance genes, such as neo and the like.

[0395] Reporter genes are used for identifying potentially transfected or transduced cells and for evaluating the functionality of regulatory sequences. In general, a reporter gene is a gene that is not present in or expressed by the recipient organism or tissue and that encodes a polypeptide whose expression is manifested by some easily detectable property, e.g., enzymatic activity. Expression of the reporter gene is assayed at a suitable time after the DNA has been introduced into the recipient cells. Suitable reporter genes may include genes encoding luciferase, beta-galactosidase, chloramphenicol acetyl transferase, secreted alkaline phosphatase, or the green fluorescent protein gene (e.g., Ui-Tei et al., 2000 FEBS Letters 479: 79-82). Suitable expression systems are well known and may be prepared using known techniques or obtained commercially. In general, the construct with the minimal 5′ flanking region showing the highest level of expression of reporter gene is identified as the promoter. Such promoter regions may be linked to a reporter gene and used to evaluate agents for the ability to modulate promoter-driven transcription.

[0396] Methods of introducing and expressing genes into a cell are known in the art. In the context of an expression vector, the vector can be readily introduced into a host cell, e.g., mammalian, bacterial, yeast, or insect cell by any method in the art. For example, the expression vector can be transferred into a host cell by physical, chemical, or biological means.

[0397] Physical methods for introducing a polynucleotide into a host cell include calcium phosphate precipitation, lipofection, particle bombardment, microinjection, electroporation, and the like. Methods for producing cells comprising vectors and/or exogenous nucleic acids are well-known in the art. See, for example, Sambrook et al. (2001, Molecular Cloning: A Laboratory Manual, Cold Spring Harbor Laboratory, New York). One method for the introduction of a polynucleotide into a host cell is calcium phosphate transfection.

[0398] Biological methods for introducing a polynucleotide of interest into a host cell include the use of DNA and RNA vectors. Viral vectors, and especially retroviral vectors, have become the most widely used method for inserting genes into mammalian, e.g., human cells. Other viral vectors can be derived from lentivirus, poxviruses, herpes simplex virus I, adenoviruses and adeno-associated viruses, and the like. See, for example, U.S. Pat. Nos. 5,350,674 and 5,585,362.

[0399] Chemical means for introducing a polynucleotide into a host cell include colloidal dispersion systems, such as macromolecule complexes, nanocapsules, microspheres, beads, and lipid-based systems including oil-in-water emulsions, micelles, mixed micelles, and liposomes. An exemplary colloidal system for use as a delivery vehicle in vitro and in vivo is a liposome (e.g., an artificial membrane vesicle).

[0400] Regardless of the method used to introduce exogenous nucleic acids into a host cell or otherwise expose a cell to the inhibitor of the present invention, in order to confirm the presence of the recombinant DNA sequence in the host cell, a variety of assays may be performed. Such assays include, for example, “molecular biological” assays well known to those of skill in the art, such as Southern and Northern blotting, RT-PCR and PCR; “biochemical” assays, such as detecting the presence or absence of a particular peptide, e.g., by immunological means (ELISAs and Western blots) or by assays described herein to identify agents falling within the scope of the invention.

### Immune Cells

[0401] Provided herein are immune cells comprising the interfering RNAs, polynucleotides, vectors, fusion proteins and engineered receptors described herein.

[0402] Provided herein are immune cells comprising the interfering RNAs, e.g. shRNAS, described herein. In some embodiments, the immune cells comprise the interfering RNAs. polynucleotides, vectors, fusion proteins or engineered receptors of the disclosure.

[0403] In some embodiments, the immune cell is a T cell, B cell, or Natural Killer (NK) cell. In some embodiments, the immune cell is autologous to a subject. In some embodiments, the immune cell is allogeneic to a subject. In some embodiments, the immune cell is non-natural.

[0404] In some embodiments, the immune cell is isolated. In some embodiments, the immune cell is for use as a medicament. In some embodiments, the medicament is for the treatment of cancer in a subject in need thereof.

[0405] In some embodiments, the immune cell comprises an inhibitory receptor comprising a ligand binding domain specific to a class I major histocompatibility complex (MHC-I) molecule, or a peptide-MHC complex thereof, wherein expression and/or function of a human leukocyte antigen (HLA) polypeptide, or an allele thereof, in said immune cell has been reduced or eliminated. In some embodiments, the HLA allele is an HLA-A, HLA-B, HLA-C, and/or HLA-E allele. In some embodiments, the HLA-A allele is selected from HLA-A*02, HLA-A*02:01, HLA-A*02:01:01, and HLA-A*02:01:01:01. In some embodiments, the HLA-A allele is HLA-A*02.

[0406] In some embodiments, the immune cell comprises an interfering RNA, comprising a sequence complementary to a sequence of a HLA-A*02 mRNA. In some embodiments, the interfering RNA is capable of inducing RNAi-mediated degradation of the HLA-A*02 mRNA. In some embodiments, the interfering RNA is a short hairpin RNA (shRNA).

[0407] In some embodiments, the shRNA comprises a first sequence, having from 5′ to 3′ end a sequence complementary to the HLA-A*02 mRNA; and a second sequence, having from 5′ to 3′ end a sequence complementary to the first sequence, wherein the first sequence and second sequence form the shRNA.

[0408] In some embodiments, the first sequences is 18, 19, 20, 21, or 22 nucleotides. In some embodiments, the first sequence is complementary to a sequence selected from SEQ ID NOs: 400-8794. In some embodiments, the first sequence has GC content greater than or equal to 25% and less than 60%. In some embodiments, the first sequence is complementary to a sequence selected from SEQ ID NOs: 400-3990. In some embodiments, the first sequence does not comprise four nucleotides of the same base or a run of seven C or G nucleotide bases. In some embodiments, the first sequence is complementary to a sequence selected from SEQ ID NOs: 400-3508. In some embodiments, the first sequence is complementary to a sequence selected from SEQ ID NOs: 400-678. In some embodiments, the first sequence is complementary to a sequence selected from SEQ ID NOs: 400-485. Illustrative target HLA-A sequences complementary to the first sequence are shown in Table 12.

[0409] In some embodiments, the first and second sequence are present on a single stranded polynucleotide, wherein the first sequence and second sequence are separated by 4, 5, 6, 7, 8, 9, 10, 11, 12, 13, 14, or 15 nucleotides, wherein the 4, 5, 6, 7, 8, 9, 10, 11, 12, 13, 14, or 15 nucleotides form a loop region in the shRNA. In some embodiments, the loop region comprises a sequence selected from SEQ ID NOs: 8800-8813. Illustrative loop region sequences are shown in Table 3.

[0410] In some embodiments, the shRNA further comprises a 5′ flank sequence and a 3′ flank sequence, wherein the 5′ flank sequence is joined to the 5′ end of the first sequence, and wherein the 3′ flank sequence is joined to the 3′ end of the second sequence. In some embodiments, the 5′ flank sequence is selected from SEQ ID NO: 8814-8816. In some embodiments, the 3′ flank sequence is selected from SEQ ID NO: 8817-8819. Illustrative flank sequences are shown in Table 4.

[0411] As used herein, the term “immune cell” refers to a cell involved in the innate or adaptive (acquired) immune systems. Exemplary innate immune cells include phagocytic cells such as neutrophils, monocytes and macrophages, Natural Killer (NK) cells, polymorphonuclear leukocytes such as neutrophils eosinophils and basophils and mononuclear cells such as monocytes, macrophages and mast cells. Immune cells with roles in acquired immunity include lymphocytes such as T-cells and B-cells.

[0412] As used herein, a “T-cell” refers to a type of lymphocyte that originates from a bone marrow precursor that develops in the thymus gland. There are several distinct types of T-cells which develop upon migration to the thymus, which include, helper CD4+ T-cells, cytotoxic CD8+ T cells, memory T cells, regulatory CD4+ T-cells and stem memory T-cells. Different types of T-cells can be distinguished by the ordinarily skilled artisan based on their expression of markers. Methods of distinguishing between T-cell types will be readily apparent to the ordinarily skilled artisan.

[0413] In some embodiments, the engineered immune cell expresses the first and second receptors at a ratio of about 100:1 to 1:100 of first receptor to second receptor. In some embodiments, the engineered immune cell expresses the first and second receptors at a ratio of about 50:1 to 1:50 of first receptor to second receptor. In some embodiments, the engineered immune cell expresses the first and second receptors at a ratio of about 10:1 to 1:10 of first receptor to second receptor. In some embodiments, the engineered immune cell expresses the first and second receptors at a ratio of about 5:1 to 1:5 of first receptor to second receptor. In some embodiments, the engineered immune cell expresses the first and second receptors at a ratio of about 3:1 to 1:3 of first receptor to second receptor. In some embodiments, the engineered immune cell expresses the first and second receptors at a ratio of about 2:1 to 1:2 of first receptor to second receptor. In some embodiments, the engineered immune cell expresses the first and second receptors at a ratio of about 1:1.

[0414] In some embodiments, the engineered immune cell comprising the engineered receptors of the disclosure is a T cell. In some embodiments, the T cell is an effector T cell or a regulatory T cell.

[0415] Methods transforming populations of immune cells, such as T cells, with the vectors of the instant disclosure will be readily apparent to the person of ordinary skill in the art. For example, CD3+ T cells can be isolated from PBMCs using a CD3+ T cell negative isolation kit (Miltenyi), according to manufacturer's instructions. T cells can be cultured at a density of 1×10\hat{ }6 cells/mL in X-Vivo 15 media supplemented with 5% human A/B serum and 1% Pen/strep in the presence of CD3/28 Dynabeads (1:1 cell to bead ratio) and 300 Units/mL of IL-2 (Miltenyi). After 2 days, T cells can be transduced with viral vectors, such as lentiviral vectors using methods known in the art. In some embodiments, the viral vector is transduced at a multiplicity of infection (MOI) of 5. Cells can then be cultured in IL-2 or other cytokines such as combinations of IL-7/15/21 for an additional 5 days prior to enrichment. Methods of isolating and culturing other populations of immune cells, such as B cells, or other populations of T cells, will be readily apparent to the person of ordinary skill in the art. Although this method outlines a potential approach it should be noted that these methodologies are rapidly evolving. For example excellent viral transduction of peripheral blood mononuclear cells can be achieved after 5 days of growth to generate a >99% CD3+ highly transduced cell population.

[0416] Methods of activating and culturing populations of T cells comprising the engineered TCRs, CARs, fusion proteins or vectors encoding the fusion proteins of the instant disclosure, will be readily apparent to the person of ordinary skill in the art.

[0417] Whether prior to or after genetic modification of T cells to express an engineered TCR, the T cells can be activated and expanded generally using methods as described, for example, in U.S. Pat. Nos. 6,352,694; 6,534,055; 6,905,680; 6,692,964; 5,858,358; 6,887,466; 6,905,681; 7,144,575; 7,067,318; 7,172,869; 7,232,566; 7,175,843; 5,883,223; 6,905,874; 6,797,514; 6,867,041, 10,040,846; and U.S. Pat. Appl. Pub. No. 2006/0121005.

[0418] In some embodiments, T cells of the instant disclosure are expanded and activated in vitro. Generally, the T cells of the instant disclosure are expanded in vitro by contact with a surface having attached thereto an agent that stimulates a CD3/TCR complex associated signal and a ligand that stimulates a co-stimulatory molecule on the surface of the T cells. In particular, T cell populations may be stimulated as described herein, such as by contact with an anti-CD3 antibody. For co-stimulation of an accessory molecule on the surface of the T cells, a ligand that binds the accessory molecule is used. For example, a population of T cells can be contacted with an anti-CD3 antibody and an anti-CD28 antibody, under conditions appropriate for stimulating proliferation of the T cells. To stimulate proliferation of either CD4+ T cells or CD8+ T cells, an anti-CD3 antibody and an anti-CD28 antibody can be used. Examples of an anti-CD28 antibody include 9.3, B-T3, XR-CD28 (Diaclone, Besangon, France) can be used as can other methods commonly known in the art (Berg et al., Transplant Proc. 30(8):3975-3977, 1998; Haanen et al., J. Exp. Med. 190(9):13191328, 1999; Garland et al., J. Immunol Meth. 227(1-2):53-63, 1999).

[0419] In some embodiments, the primary stimulatory signal and the co-stimulatory signal for the T cell may be provided by different protocols. For example, the agents providing each signal may be in solution or coupled to a surface. When coupled to a surface, the agents may be coupled to the same surface (i.e., in “cis” formation) or to separate surfaces (i.e., in “trans” formation). Alternatively, one agent may be coupled to a surface and the other agent in solution. In some embodiments, the agent providing the co-stimulatory signal is bound to a cell surface and the agent providing the primary activation signal is in solution or coupled to a surface. In certain embodiments, both agents can be in solution. In another embodiment, the agents may be in soluble form, and then cross-linked to a surface, such as a cell expressing Fc receptors or an antibody or other binding agent which will bind to the agents. In this regard, see for example, U.S. Patent Application Publication Nos. 20040101519 and 20060034810 for artificial antigen presenting cells (aAPCs) that are contemplated for use in activating and expanding T cells in the present invention.

[0420] In some embodiments, the two agents are immobilized on beads, either on the same bead, i.e., “cis,” or to separate beads, i.e., “trans.” By way of example, the agent providing the primary activation signal is an anti-CD3 antibody or an antigen-binding fragment thereof and the agent providing the co-stimulatory signal is an anti-CD28 antibody or antigen-binding fragment thereof, and both agents are co-immobilized to the same bead in equivalent molecular amounts. In one embodiment, a 1:1 ratio of each antibody bound to the beads for CD4+ T cell expansion and T cell growth is used. In some embodiments, the ratio of CD3:CD28 antibody bound to the beads ranges from 100:1 to 1:100 and all integer values there between. In one aspect of the present invention, more anti-CD28 antibody is bound to the particles than anti-CD3 antibody, i.e., the ratio of CD3:CD28 is less than one. In certain embodiments of the invention, the ratio of anti CD28 antibody to anti CD3 antibody bound to the beads is greater than 2:1.

[0421] Ratios of particles to cells from 1:500 to 500:1 and any integer values in between may be used to stimulate T cells or other target cells. As those of ordinary skill in the art can readily appreciate, the ratio of particles to cells may depend on particle size relative to the target cell. For example, small sized beads could only bind a few cells, while larger beads could bind many. In certain embodiments the ratio of cells to particles ranges from 1:100 to 100:1 and any integer values in-between and in further embodiments the ratio comprises 1:9 to 9:1 and any integer values in between, can also be used to stimulate T cells. In some embodiments, a ratio of 1:1 cells to beads is used. One of skill in the art will appreciate that a variety of other ratios may be suitable for use in the present invention. In particular, ratios will vary depending on particle size and on cell size and type.

[0422] In further embodiments of the present invention, the cells, such as T cells, are combined with agent-coated beads, the beads and the cells are subsequently separated, and then the cells are cultured. In an alternative embodiment, prior to culture, the agent-coated beads and cells are not separated but are cultured together. In a further embodiment, the beads and cells are first concentrated by application of a force, such as a magnetic force, resulting in increased ligation of cell surface markers, thereby inducing cell stimulation.

[0423] By way of example, cell surface proteins may be ligated by allowing paramagnetic beads to which anti-CD3 and anti-CD28 are attached to contact the T cells. In one embodiment the cells (for example, CD4+ T cells) and beads (for example, DYNABEADS CD3/CD28 T paramagnetic beads at a ratio of 1:1) are combined in a buffer. Again, those of ordinary skill in the art can readily appreciate any cell concentration may be used. In certain embodiments, it may be desirable to significantly decrease the volume in which particles and cells are mixed together (i.e., increase the concentration of cells), to ensure maximum contact of cells and particles. For example, in one embodiment, a concentration of about 2 billion cells/ml is used. In another embodiment, greater than 100 million cells/ml is used. In a further embodiment, a concentration of cells of 10, 15, 20, 25, 30, 35, 40, 45, or 50 million cells/ml is used. In yet another embodiment, a concentration of cells from 75, 80, 85, 90, 95, or 100 million cells/ml is used. In further embodiments, concentrations of 125 or 150 million cells/ml can be used. In some embodiments, cells that are cultured at a density of 1×10⁶ cells/mL are used.

[0424] In some embodiments, the mixture may be cultured for several hours (about 3 hours) to about 14 days or any hourly integer value in between. In another embodiment, the beads and T cells are cultured together for 2-3 days. Conditions appropriate for T cell culture include an appropriate media (e.g., Minimal Essential Media or RPMI Media 1640 or, X-vivo 15, (Lonza)) that may contain factors necessary for proliferation and viability, including serum (e.g., fetal bovine or human serum), interleukin-2 (IL-2), insulin, IFN-7, IL-4, IL-7, GM-CSF, IL-10, IL-12, IL-15, TGFβ, and TNF-α or any other additives for the growth of cells known to the skilled artisan. Other additives for the growth of cells include, but are not limited to, surfactant, plasmanate, and reducing agents such as N-acetyl-cysteine and 2-mercaptoethanol. Media can include RPMI 1640, AIM-V, DMEM, MEM, α-MEM, F-12, X-Vivo 15, and X-Vivo 20, Optimizer, with added amino acids, sodium pyruvate, and vitamins, either serum-free or supplemented with an appropriate amount of serum (or plasma) or a defined set of hormones, and/or an amount of cytokine(s) sufficient for the growth and expansion of T cells. In some embodiments, the media comprises X-VIVO-15 media supplemented with 5% human A/B serum, 1% penicillin/streptomycin (pen/strep) and 300 Units/ml of IL-2 (Miltenyi).

[0425] The T cells are maintained under conditions necessary to support growth, for example, an appropriate temperature (e.g., 37° C.) and atmosphere (e.g., air plus 5% CO2).

[0426] In some embodiments, the T cells comprising engineered TCRs of the disclosure are autologous. Prior to expansion and genetic modification, a source of T cells is obtained from a subject. Immune cells such as T cells can be obtained from a number of sources, including peripheral blood mononuclear cells, bone marrow, lymph node tissue, cord blood, thymus tissue, tissue from a site of infection, ascites, pleural effusion, spleen tissue, and tumors. In certain embodiments of the present invention, any number of T cell lines available in the art, may be used. In certain embodiments of the present invention, T cells can be obtained from a unit of blood collected from a subject using any number of techniques known to the skilled artisan, such as Ficoll™ separation.

[0427] In some embodiments, cells from the circulating blood of an individual are obtained by apheresis. The apheresis product typically contains lymphocytes, including T cells, monocytes, granulocytes, B cells, other nucleated white blood cells, red blood cells, and platelets. In some embodiments, the cells collected by apheresis may be washed to remove the plasma fraction and to place the cells in an appropriate buffer or media for subsequent processing steps. In some embodiments, the cells are washed with phosphate buffered saline (PBS). In alternative embodiments, the wash solution lacks calcium and may lack magnesium or may lack many if not all divalent cations. As those of ordinary skill in the art would readily appreciate a washing step may be accomplished by methods known to those in the art, such as by using a semi-automated “flow-through” centrifuge (for example, the Cobe 2991 cell processor, the Baxter CytoMate, or the Haemonetics Cell Saver 5) according to the manufacturer's instructions. After washing, the cells may be resuspended in a variety of biocompatible buffers, such as, for example, Ca2+-free, Mg2+-free PBS, PlasmaLyte A, or other saline solution with or without buffer. Alternatively, the undesirable components of the apheresis sample may be removed and the cells directly resuspended in culture media.

[0428] In some embodiments, immune cells such as T cells are isolated from peripheral blood lymphocytes by lysing the red blood cells and depleting the monocytes, for example, by centrifugation through a PERCOLL™ gradient or by counterflow centrifugal elutriation. Specific subpopulations of immune cells, such as T cells, B cells, or CD4+ T cells can be further isolated by positive or negative selection techniques. For example, in one embodiment, T cells are isolated by incubation with anti-CD4-conjugated beads, for a time period sufficient for positive selection of the desired T cells.

[0429] Enrichment of an immune cell population, such as a T cell population, by negative selection can be accomplished with a combination of antibodies directed to surface markers unique to the negatively selected cells. One method is cell sorting and/or selection via negative magnetic immune-adherence or flow cytometry that uses a cocktail of monoclonal antibodies directed to cell surface markers present on the cells negatively selected. For example, to enrich for CD4+ cells by negative selection, a monoclonal antibody cocktail typically includes antibodies to CD 14, CD20, CD 11b, CD 16, HLA-DR, and CD8.

[0430] For isolation of a desired population of immune cells by positive or negative selection, the concentration of cells and surface (e.g., particles such as beads) can be varied. In certain embodiments, it may be desirable to significantly decrease the volume in which beads and cells are mixed together (i.e., increase the concentration of cells), to ensure maximum contact of cells and beads.

[0431] In some embodiments, the cells may be incubated on a rotator for varying lengths of time at varying speeds at either 2-10° C. or at room temperature.

[0432] T cells for stimulation, or PBMCs from which immune cells such as T cells are isolated, can also be frozen after a washing step. Wishing not to be bound by theory, the freeze and subsequent thaw step provides a more uniform product by removing granulocytes and to some extent monocytes in the cell population. After the washing step that removes plasma and platelets, the cells may be suspended in a freezing solution. While many freezing solutions and parameters are known in the art and will be useful in this context, one method involves using PBS containing 20% DMSO and 8% human serum albumin, or culture media containing 10% Dextran 40 and 5% Dextrose, 20% Human Serum Albumin and 7.5% DMSO, or 31.25% Plasmalyte-A, 31.25% Dextrose 5%, 0.45% NaCl, 10% Dextran 40 and 5% Dextrose, 20% Human Serum Albumin, and 7.5% DMSO or other suitable cell freezing media containing for example, Hespan and PlasmaLyte A, the cells then are frozen to −80° C. at a rate of 1° per minute and stored in the vapor phase of a liquid nitrogen storage tank. Other methods of controlled freezing may be used as well as uncontrolled freezing immediately at −20° C. or in liquid nitrogen.

### Pharmaceutical Compositions

[0433] The disclosure provides pharmaceutical compositions comprising immune cells of the disclosure, and comprising the engineered receptors of the disclosure and a pharmaceutically acceptable diluent, carrier or excipient. In some embodiments, the immune cell comprises an inhibitory receptor comprising a ligand binding domain specific to a class I major histocompatibility complex (MHC-I) molecule, or a peptide-MHC complex thereof, wherein expression and/or function of human leukocyte antigen (HLA) in said immune cell has been reduced or eliminated. In some embodiments, the immune cell comprises an interfering RNA, comprising a sequence complementary to a sequence of a HLA-A*02 mRNA. In some embodiments, the interfering RNA is capable of inducing RNAi-mediated degradation of the HLA-A*02 mRNA. In some embodiments, the interfering RNA is a short hairpin RNA (shRNA) as described herein. In some embodiments, the immune cell further comprises an activator receptor as described herein.

[0434] Such compositions may comprise buffers such as neutral buffered saline, phosphate buffered saline and the like; carbohydrates such as glucose, mannose, sucrose or dextrans, mannitol; proteins; polypeptides or amino acids such as glycine; antioxidants; chelating agents such as EDTA or glutathione; and preservatives.

[0435] Provided herein are methods of producing an immune cell with reduced autocrine binding/signaling comprising transducing and/or transfecting the immune cell with a vector described herein. In some embodiments, the method comprises transducing the immune cell with a first vector comprising a sequence encoding an activator receptor and a second vector comprising a sequence encoding an inhibitory receptor, thereby producing an immune cell expressing the activator and inhibitory receptors. In some embodiments, the inhibitory receptor specifically binds to an HLA-A*02 pMHC antigen and the target gene comprises HLA-A*02. In some embodiments, prior to the transducing and/or transfecting steps, the immune cell comprises a polynucleotide or vector encoding interfering RNA targeting a HLA-A*02 mRNA.

### Methods of Treating Disease

[0436] Provided herein are methods of treating a subject in need thereof, comprising administering to the subject a therapeutically effective amount of a composition comprising immune cells comprising the engineered receptors and having reduced or eliminated expression and/or function of HLA. In some embodiments, the immune cell comprises an interfering RNA (e.g. an shRNA), polynucleotide, vector, fusion protein, engineered receptor (e.g. an inhibitory receptor) of the disclosure.

[0437] In some embodiments, the method of treating a subject in need thereof comprises providing immune cells from a subject suffering from or at risk for cancer or a hematological malignancy; transducing the immune cell with the vectors described herein; and administering the immune cell to the subject.

[0438] Provided herein are methods of manufacturing a composition comprising immune cells with reduced autocrine binding/signaling comprising providing immune cells from a subject suffering from or at risk for cancer or a hematological malignancy; and transducing or transfecting the immune cell with one or more vectors described herein. In some embodiments, the vector encodes an interfering RNA targeting HLA-A*02 mRNA. In some embodiments, the vector encodes an engineered receptor (e.g. an inhibitory receptor that specifically binds to HLA-A*02 pMHC antigen and the target gene comprises HLA-A*02. In some embodiments, prior to the transducing and/or transfecting steps, the immune cell comprises a polynucleotide encoding activator and/or inhibitory receptors. In some embodiments, the method comprises transducing the immune cell with a first vector comprising a sequence encoding the activator receptor and a second vector comprising a sequence encoding the inhibitory receptor, thereby producing an immune cell expressing the activator and inhibitory receptors.

[0439] The current method for adoptive cell therapy using autologous cells includes isolating immune cells from patient blood, performing a series of modifications on the isolated cells, and administering the cells to a patient (Papathanasiou et al. Cancer Gene Therapy. 27:799-809 (2020)). Providing immune cells from a subject suffering from or at risk for cancer or a hematological malignancy requires isolation of immune cell from the patient's blood, and can be accomplished through methods known in the art, for example, by leukapheresis. During leukapheresis, blood from a subject is extracted and the peripheral blood mononuclear cells (PBMCs) are separated, and the remainder of the blood is returned to the subject's circulation. The PBMCs are stored either frozen or cryopreserved as a sample of immune cells and provided for further processing steps, such as, e.g. the modifications described herein.

[0440] In some embodiments, the method of treating a subject described herein comprises modifications to immune cells from the subject comprising a series of modifications comprising enrichment, activation, genetic modification, expansion, formulation, and cryopreservation.

[0441] The disclosure provides enrichment steps that can be, for example, washing and fractionating methods known in the art for preparation of subject PBMCs for downstream procedures, e.g. the modifications described herein. For example, without limitation, methods can include devices to remove gross red blood cells and platelet contaminants, systems for size-based cell fractionation for the depletion of monocytes and the isolation of lymphocytes, and/or systems that allow the enrichment of specific subsets of T cells, such as, e.g. CD4+, CD8+, CD25+, or CD62L+ T cells. Following the enrichment steps, a target sub-population of immune cells will be isolated from the subject PMBCs for further processing. Those skilled in the art will appreciate that enrichment steps, as provided herein, may also encompass any newly discovered method, device, reagent or combination thereof.

[0442] The disclosure provides activation steps that can be any method known in the art to induce activation of immune cells, e.g. T cells, required for their ex vivo expansion. Immune cell activation can be achieved, for example, by culturing the subject immune cells in the presence of dendritic cells, culturing the subject immune cells in the presence of artificial antigen-presenting cells (AAPCs), or culturing the immune cells in the presence of irradiated K562-derived AAPCs. Other methods for activating subject immune cells can be, for example, culturing the immune cells in the presence of isolated activating factors and compositions, e.g. beads, surfaces, or particles functionalized with activating factors. Activating factors can include, for example, antibodies, e.g. anti-CD3 and/or anti-CD28 antibodies. Activating factors can also be, for example, cytokines, e.g. interleukin (IL)-2 or IL-21. Activating factors can also be costimulatory molecules, such as, for example, CD40, CD40L, CD70, CD80, CD83, CD86, CD137L, ICOSL, GITRL, and CD134L. Those skilled in the art will appreciate that activating factors, as provided herein, may also encompass any newly discovered activating factor, reagent, composition, or combination thereof that can activate immune cells.

[0443] The disclosure provides expansion steps for the immune cells described herein. Immune cells can be expanded in any immune cell expansion system known in the art to generate therapeutic doses of immune cells for administration. For example, bioreactor bags for use in a system comprising controller pumps, and probes that allow for automatic feeding and waste removal can be used for immune cell expansion. Cell culture flasks with gas-permeable membranes at the base may be used for immune cell expansion. Any such system known in the art that enables expansion of immune cells for clinical use is encompassed by the expansion step provided herein. Immune cells are expanded in culture systems in media formulated specifically for expansion. Expansion can also be facilitated by culturing the immune cell of the disclosure in the presence of activation factors as described herein. Those skilled in the art will appreciate that expansion steps, as provided herein, may also encompass any newly discovered culture systems, media, or activating factors that can be used to expand immune cells.

[0444] The disclosure provides formulation and cryopreservation steps for the expanded immune cells. Formulation steps provided include, for example, washing away excess components used in the preparation and expansion of immune cells of the methods of treatment described herein. Any pharmaceutically acceptable formulation medium or wash buffer compatible with immune cell known in the art may be used to wash, dilute/concentration immune cells, and prepare doses for administration. Formulation medium can be acceptable for administration of the immune cells, such as, for example crystalloid solutions for intravenous infusion. Cryopreservation can optionally be used to store immune cells long-term. Cryopreservation can be achieved using known methods in the art, including for example, storing cells in a cryopreservation medium containing cryopreservation components. Cryopreservation components can include, for example, dimethyl sulfoxide or glycerol. Immune cells stored in cryopreservation medium can be cryopreserved by reducing the storage temperature to −80° C. to −180° C.

[0445] In some embodiments, the method comprises administering immune cells described herein. In some embodiments, the method comprises administering a conditioning regimen prior to administering the immune cells described herein. In some embodiments, the conditioning regimen is lymphodepletion. A lymphodepletion regimen can include, for example, administration of alemtuzumab, cyclophosphamide, benduamustin, rituximab, pentostatin, and/or fludarabine. Lymphodepletion regimen can be administered in one or more cycles until the desired outcome of reduced circulating immune cells.

[0446] In some embodiments, the conditioning regimen comprises administering an agent that specifically targets, and reduces or eliminates CD52+ cells in the subject, and the immune cells are modified to reduce or eliminate CD52 expression.

[0447] In some embodiments, the method of treatment comprises determining the HLA germline type of the subject. In some embodiments, determining the HLA germline type comprises determining the presence of HLA-A*02:01 heterozygosity. In some embodiments, the HLA germline type is determined in bone marrow.

[0448] In some embodiments, the method of treatment comprises determining the level of expression of an activator ligand. In some embodiments, the level of expression of an activator ligand is determined in tumor tissue samples from the subject. In some embodiments, the expression level of an activator ligand is determined using next generation sequencing. In some embodiments, the expression level of an activator ligand is determined using RNA sequencing. In some embodiments, the level of an activator ligand is determined using immunohistochemistry.

[0449] In some embodiments, the method of treatment comprises administering a therapeutically effective dose of immune cells in a subject in need thereof, wherein the subject is determined to be HLA germline HLA-A*02:01 heterozygous and have tumor tissue with activator expression and loss of HLA-A*02:01.

[0450] In some embodiments, a therapeutically effective dose of the immune cells described herein are administered. In some embodiments, the immune cells of the disclosure are administered by intravenous injection. In some embodiments, the immune cells of the disclosure are administered by intraperitoneal injection. In some embodiments, a therapeutically effective dose comprises about 0.5×10⁶ cells, about 1×10⁶ cells, about 2×10⁶ cells, about 3×10⁶ cells, 4×10⁶ cells, about 5×10⁶ cells, about 6×10⁶ cells, about 7×10⁶ cells, about 8×10⁶ cells, about 9×10⁶ cells, about 1×10⁷, about 2×10⁷, about 3×10⁷, about 4×10⁷, about 5×10⁷, about 6×10⁷, about 7×10⁷, about 8×10⁷, about 9×10⁷, 1×10⁸ cells, about 2×10⁸ cells, about 3×10⁸ cells, about 4×10⁸ cells, about 5×10⁸ cells, or about 6×10⁸ cells. In some embodiments, a therapeutically effective dose comprises about 0.5×10⁶ cells to about 6×10⁸ cells, about 1×10⁶ cells to about 5×10⁸ cells, about 2×10⁶ cells to about 5×10⁶ cells, about 3×10⁶ cells to about 4×10⁸ cells, about 4×10⁶ cells to about 3×10⁸ cells, about 5×10⁶ cells to about 2×10⁸ cells, about 6×10⁶ cells to about 1×10⁸ cells, about 7×10⁶ cells to about 9×10⁷ cells, about 8×10⁶ cells to about 8×10⁷ cells, about 9×10⁶ cells to about 7×10⁷ cells, about 1×10⁷ cells to about 6×10⁷ cells, or about 2×10⁷ cells to about 5×10⁷ cells. In some embodiments, a therapeutically effective dose comprises about 0.5×10⁶ cells to about 6×10⁸ cells. The term “about” as referred to in a therapeutically dose, can be, for example, ±0.5×10⁶ cells, 0.5×10⁷ cells, or 0.5×10⁸ cells.

[0451] In some embodiments, the subject in need thereof has cancer. Cancer is a disease in which abnormal cells divide without control and spread to nearby tissue. In some embodiments, the cancer comprises a liquid tumor or a solid tumor. Exemplary liquid tumors include leukemias and lymphomas. Further cancers that are liquid tumors can be those that occur, for example, in blood, bone marrow, and lymph nodes, and can include, for example, leukemia, myeloid leukemia, lymphocytic leukemia, lymphoma, Hodgkin's lymphoma, melanoma, and multiple myeloma. Leukemias include, for example, acute lymphoblastic leukemia (ALL), acute myeloid leukemia (AML), chronic lymphocytic leukemia (CLL), chronic myelogenous leukemia (CML), and hairy cell leukemia. Exemplary solid tumors include sarcomas and carcinomas. Cancers can arise in virtually an organ in the body, including blood, bone marrow, lung, breast, colon, bone, central nervous system, pancreas, prostate and ovary. Further cancers that are solid tumors include, for example, prostate cancer, testicular cancer, breast cancer, brain cancer, pancreatic cancer, colon cancer, thyroid cancer, stomach cancer, lung cancer, ovarian cancer, Kaposi's sarcoma, skin cancer, squamous cell skin cancer, renal cancer, head and neck cancers, throat cancer, squamous carcinomas that form on the moist mucosal linings of the nose, mouth, throat, bladder cancer, osteosarcoma, cervical cancer, endometrial cancer, esophageal cancer, liver cancer, and kidney cancer. In some embodiments, the condition treated by the methods described herein is metastasis of melanoma cells, prostate cancer cells, testicular cancer cells, breast cancer cells, brain cancer cells, pancreatic cancer cells, colon cancer cells, thyroid cancer cells, stomach cancer cells, lung cancer cells, ovarian cancer cells, Kaposi's sarcoma cells, skin cancer cells, renal cancer cells, head or neck cancer cells, throat cancer cells, squamous carcinoma cells, bladder cancer cells, osteosarcoma cells, cervical cancer cells, endometrial cancer cells, esophageal cancer cells, liver cancer cells, or kidney cancer cells.

[0452] Any cancer wherein a plurality of the cancer cells express the first, activator ligand and do not express the second, inhibitor ligand is envisaged as within the scope of the instant disclosure. For example, CEA positive cancers that can be treated using the methods described herein include colorectal cancer, pancreatic cancer, esophageal cancer, gastric cancer, lung adenocarcinoma, head and neck cancer, diffuse large B cell cancer or acute myeloid leukemia cancer.

[0453] Treating cancer can result in a reduction in size of a tumor. A reduction in size of a tumor may also be referred to as “tumor regression”. Preferably, after treatment, tumor size is reduced by 5% or greater relative to its size prior to treatment; more preferably, tumor size is reduced by 10% or greater; more preferably, reduced by 20% or greater; more preferably, reduced by 30% or greater; more preferably, reduced by 40% or greater; even more preferably, reduced by 50% or greater; and most preferably, reduced by greater than 75% or greater. Size of a tumor may be measured by any reproducible means of measurement. The size of a tumor may be measured as a diameter of the tumor.

[0454] Treating cancer can result in a reduction in tumor volume. Preferably, after treatment, tumor volume is reduced by 5% or greater relative to its size prior to treatment; more preferably, tumor volume is reduced by 10% or greater; more preferably, reduced by 20% or greater; more preferably, reduced by 30% or greater; more preferably, reduced by 40% or greater; even more preferably, reduced by 50% or greater; and most preferably, reduced by greater than 75% or greater. Tumor volume may be measured by any reproducible means of measurement.

[0455] Treating cancer results in a decrease in number of tumors. Preferably, after treatment, tumor number is reduced by 5% or greater relative to number prior to treatment; more preferably, tumor number is reduced by 10% or greater; more preferably, reduced by 20% or greater; more preferably, reduced by 30% or greater; more preferably, reduced by 40% or greater; even more preferably, reduced by 50% or greater; and most preferably, reduced by greater than 75%. Number of tumors may be measured by any reproducible means of measurement. The number of tumors may be measured by counting tumors visible to the naked eye or at a specified magnification. Preferably, the specified magnification is 2×, 3×, 4×, 5×, 10×, or 50×.

[0456] Treating cancer can result in a decrease in number of metastatic lesions in other tissues or organs distant from the primary tumor site. Preferably, after treatment, the number of metastatic lesions is reduced by 5% or greater relative to number prior to treatment; more preferably, the number of metastatic lesions is reduced by 10% or greater; more preferably, reduced by 20% or greater; more preferably, reduced by 30% or greater; more preferably, reduced by 40% or greater; even more preferably, reduced by 50% or greater; and most preferably, reduced by greater than 75%. The number of metastatic lesions may be measured by any reproducible means of measurement. The number of metastatic lesions may be measured by counting metastatic lesions visible to the naked eye or at a specified magnification. Preferably, the specified magnification is 2×, 3×, 4×, 5×, 10×, or 50×.

[0457] Treating cancer can result in an increase in average survival time of a population of treated subjects in comparison to a population receiving carrier alone. Preferably, the average survival time is increased by more than 30 days; more preferably, by more than 60 days; more preferably, by more than 90 days; and most preferably, by more than 120 days. An increase in average survival time of a population may be measured by any reproducible means. An increase in average survival time of a population may be measured, for example, by calculating for a population the average length of survival following initiation of treatment with an active compound. An increase in average survival time of a population may also be measured, for example, by calculating for a population the average length of survival following completion of a first round of treatment with an active compound.

[0458] Treating cancer can result in an increase in average survival time of a population of treated subjects in comparison to a population of untreated subjects. Preferably, the average survival time is increased by more than 30 days; more preferably, by more than 60 days; more preferably, by more than 90 days; and most preferably, by more than 120 days. An increase in average survival time of a population may be measured by any reproducible means. An increase in average survival time of a population may be measured, for example, by calculating for a population the average length of survival following initiation of treatment with an active compound. An increase in average survival time of a population may also be measured, for example, by calculating for a population the average length of survival following completion of a first round of treatment with an active compound.

[0459] Treating cancer can result in increase in average survival time of a population of treated subjects in comparison to a population receiving monotherapy with a drug that is not a compound of the present invention, or a pharmaceutically acceptable salt, prodrug, metabolite, analog or derivative thereof. Preferably, the average survival time is increased by more than 30 days; more preferably, by more than 60 days; more preferably, by more than 90 days; and most preferably, by more than 120 days. An increase in average survival time of a population may be measured by any reproducible means. An increase in average survival time of a population may be measured, for example, by calculating for a population the average length of survival following initiation of treatment with an active compound. An increase in average survival time of a population may also be measured, for example, by calculating for a population the average length of survival following completion of a first round of treatment with an active compound.

[0460] Treating cancer can result in a decrease in the mortality rate of a population of treated subjects in comparison to a population receiving carrier alone. Treating cancer can result in a decrease in the mortality rate of a population of treated subjects in comparison to an untreated population. Treating cancer can result in a decrease in the mortality rate of a population of treated subjects in comparison to a population receiving monotherapy with a drug that is not a compound of the present invention, or a pharmaceutically acceptable salt, prodrug, metabolite, analog or derivative thereof. Preferably, the mortality rate is decreased by more than 2%; more preferably, by more than 5%; more preferably, by more than 10%; and most preferably, by more than 25%. A decrease in the mortality rate of a population of treated subjects may be measured by any reproducible means. A decrease in the mortality rate of a population may be measured, for example, by calculating for a population the average number of disease-related deaths per unit time following initiation of treatment with an active compound. A decrease in the mortality rate of a population may also be measured, for example, by calculating for a population the average number of disease-related deaths per unit time following completion of a first round of treatment with an active compound.

[0461] Treating cancer can result in a decrease in tumor growth rate. Preferably, after treatment, tumor growth rate is reduced by at least 5% relative to number prior to treatment; more preferably, tumor growth rate is reduced by at least 10%; more preferably, reduced by at least 20%; more preferably, reduced by at least 30%; more preferably, reduced by at least 40%; more preferably, reduced by at least 50%; even more preferably, reduced by at least 50%; and most preferably, reduced by at least 75%. Tumor growth rate may be measured by any reproducible means of measurement. Tumor growth rate can be measured according to a change in tumor diameter per unit time.

[0462] Treating cancer can result in a decrease in tumor regrowth. Preferably, after treatment, tumor regrowth is less than 5%; more preferably, tumor regrowth is less than 10%; more preferably, less than 20%; more preferably, less than 30%; more preferably, less than 40%; more preferably, less than 50%; even more preferably, less than 50%; and most preferably, less than 75%. Tumor regrowth may be measured by any reproducible means of measurement. Tumor regrowth is measured, for example, by measuring an increase in the diameter of a tumor after a prior tumor shrinkage that followed treatment. A decrease in tumor regrowth is indicated by failure of tumors to reoccur after treatment has stopped.

[0463] Treating or preventing a cell proliferative disorder can result in a reduction in the rate of cellular proliferation. Preferably, after treatment, the rate of cellular proliferation is reduced by at least 5%; more preferably, by at least 10%; more preferably, by at least 20%; more preferably, by at least 30%; more preferably, by at least 40%; more preferably, by at least 50%; even more preferably, by at least 50%; and most preferably, by at least 75%. The rate of cellular proliferation may be measured by any reproducible means of measurement. The rate of cellular proliferation is measured, for example, by measuring the number of dividing cells in a tissue sample per unit time.

[0464] Treating or preventing a cell proliferative disorder can result in a reduction in the proportion of proliferating cells. Preferably, after treatment, the proportion of proliferating cells is reduced by at least 5%; more preferably, by at least 10%; more preferably, by at least 20%; more preferably, by at least 30%; more preferably, by at least 40%; more preferably, by at least 50%; even more preferably, by at least 50%; and most preferably, by at least 75%. The proportion of proliferating cells may be measured by any reproducible means of measurement. Preferably, the proportion of proliferating cells is measured, for example, by quantifying the number of dividing cells relative to the number of nondividing cells in a tissue sample. The proportion of proliferating cells can be equivalent to the mitotic index.

[0465] Treating or preventing a cell proliferative disorder can result in a decrease in size of an area or zone of cellular proliferation. Preferably, after treatment, size of an area or zone of cellular proliferation is reduced by at least 5% relative to its size prior to treatment; more preferably, reduced by at least 10%; more preferably, reduced by at least 20%; more preferably, reduced by at least 30%; more preferably, reduced by at least 40%; more preferably, reduced by at least 50%; even more preferably, reduced by at least 50%; and most preferably, reduced by at least 75%. Size of an area or zone of cellular proliferation may be measured by any reproducible means of measurement. The size of an area or zone of cellular proliferation may be measured as a diameter or width of an area or zone of cellular proliferation.

[0466] Treating or preventing a cell proliferative disorder can result in a decrease in the number or proportion of cells having an abnormal appearance or morphology. Preferably, after treatment, the number of cells having an abnormal morphology is reduced by at least 5% relative to its size prior to treatment; more preferably, reduced by at least 10%; more preferably, reduced by at least 20%; more preferably, reduced by at least 30%; more preferably, reduced by at least 40%; more preferably, reduced by at least 50%; even more preferably, reduced by at least 50%; and most preferably, reduced by at least 75%. An abnormal cellular appearance or morphology may be measured by any reproducible means of measurement. An abnormal cellular morphology can be measured by microscopy, e.g., using an inverted tissue culture microscope. An abnormal cellular morphology can take the form of nuclear pleomorphism.

### Kits and Articles of Manufacture

[0467] The disclosure provides kits and articles of manufacture comprising the polynucleotides and vectors encoding the interfering RNAs and engineered receptors described herein, and immune cells with reduced or eliminated HLA expression and/or function described herein and comprising the engineered receptors described herein. In some embodiments, the kit comprises articles such as vials, syringes and instructions for use.

[0468] In some embodiments, the kit comprises a polynucleotide or vector comprising a sequence encoding the interfering RNAs and/or one or more engineered receptors of the disclosure.

[0469] In some embodiments, the kit comprises a plurality of immune cells comprising an interfering RNA and/or engineered receptor as described herein. In some embodiments, the plurality of immune cells comprises a plurality of T cells.

### EXAMPLES

### Example 1: Selection of Interfering RNA Sequences Targeting the HLA Gene

[0470] In order to select guide nucleic acids for targeting the HLA-A*02:01:01:01 mRNA, all possible 18 bp, 19 bp, 20 bp, 21 bp, and 22 bp transcribed sequences corresponding to HLA-A*02:01:01:01 mRNA were determined, yielding 8397 sequences. From this set of potential target sequences, those containing GC content less than 25% or greater than or equal to 60% were excluded, resulting in 3586 potential target sequences. From this set of potential target sequences, those with runs of 4 or more of the same base in a row or a run of 7 C or G bases in a row were removed, resulting in 3101 potential target sequences. Next, the sequences were analyzed by identifying favorable characteristics identified by computational tools, such as the GPP RNAi Designer (Broad Institute), and similar favorable characteristics. The final set of potential targets included 278 sequences that can be used to design interfering RNAs that target the HLA-A*02:01:01:01 mRNA transcript for degradation through RNA interference. Illustrative alignments between shRNAs with a complementary sequence to the identified targets of the analysis are shown in FIG. 5.

### Example 2: shRNA-Mediated Reduction of HLA-A*02 Cell Surface Expression

[0471] The effect of shRNA targeting the coding sequence (CDS) of the HLA-A*02:01:01:01 mRNA transcript on HLA-A*02 surface protein expression was assessed.

[0472] Jurkat cells expressing HLA-A*02 were transfected using 100 uL format Neon electroporation system (Thermo Fisher) according to manufacturer's protocol using the following settings: 3 pulses, 1500V, 10 msec. Co-transfections were performed with 200 ng of U6-shRNA plasmids and 200 ng of plasmid expressing EGFR as a transfection marker per 1 million cells. Transfected cells were recovered in RPMI media supplemented with 20% heat-inactivated FBS and 0.1% Pen/Strep.

[0473] 4 days following transfection, cells were stained for HLA-A*02 expression with BB7.2 antibody (Biolegend) and anti-EGFR antibody (Biolegend) for 30 minutes at 4° C. to assess knockdown efficiency.

[0474] The results are shown in FIG. 6. The histograms show staining for either HLA-A*02, and corresponding quantification as % expression in control cells. The results indicate that several of the shRNA candidates were able to reduce expression of HLA-A*02 by over 50% compared to control cells. In particular, shRNA-12 showed a substantial decrease exceeding 90% knockdown compared to control cells.

[0475] These results indicate the identified shRNA targeting the CDS of the HLA-A*02:01:01:01 mRNA transcript reduces expression of HLA-A*02 surface protein in immune cells.

### Example 3: shRNA-Mediated Reduction of HLA Class I Cell Surface Expression

[0476] The effect of shRNA targeting the 5′ or 3′ untranslated region (UTR) of the HLA-A*02:01:01:01 mRNA transcript on HLA Class I surface protein expression was assessed.

[0477] Jurkat cells were transfected using 100 uL format Neon electroporation system (Thermo Fisher) according to manufacturer's protocol using the following settings: 3 pulses, 1500V, 10 msec. Co-transfections were performed with 1 μg of U6-shRNA plasmids and 100 ng of plasmid expressing green fluorescent protein (GFP) as a transfection marker per 1 million cells. Transfected cells were recovered in RPMI media supplemented with 20% heat-inactivated FBS and 0.1% Pen/Strep.

[0478] 4 days following transfection, cells were stained for HLA Class I expression with W6/32 antibody (BD Biosciences) for 30 minutes at 4° C. to assess knockdown efficiency.

[0479] The results are shown in FIG. 7. The histograms show staining for HLA Class I expression. The results indicate that several of the shRNA candidates were able to reduce expression of HLA Class I compared to control cells. In particular, shRNA-35 and shRNA-63 showed a substantial decrease exceeding 90% knockdown compared to control cells.

[0480] These results indicate the identified shRNA targeting the UTRs of the HLA-A*02:01:01:01 mRNA transcript reduce expression of HLA Class I surface protein in immune cells.

### Example 4: shRNA-Mediated Reduction of HLA-A*02 Expression Increases Blocker Receptor Availability and Restores Blocker Receptor Function in HLA-A*02 Positive Jurkat Cells

[0481] The effect of shRNA targeting the CDS of HLA-A*02:01:01:01 mRNA on the expression on blocker ligand binding receptors was determined in Jurkat cells expressing HLA-A*02. (FIG. 8).

[0482] Jurkat cells that either express HLA-A*02 (A2+ Jurkat) or do not express HLA-A*02 (A2-Jurkat) were transfected using 100 uL format Neon electroporation system (Thermo Fisher) according to manufacturer's protocol using the following settings: 3 pulses, 1500V, 10 msec. Co-transfections were performed with 2 ug plasmids encoding activator and inhibitory receptors, and 2 ug of either U6-shRNA/A*02-blocker or A*02-blocker alone per million cells. Transfected cells were recovered in RPMI media supplemented with 20% heat-inactivated FBS and 0.1% Pen/Strep.

[0483] 2 days following transfection, 10⁴ jurkat cells were co-cultured with 1.2×10⁴ HeLa target cells and incubated in Corning® 384-well Low Flange White Flat Bottom Polystyrene TC-treated Microplates for 6 hours. ONE-Step Luciferase Assay System (BPS Bioscience) was used to evaluate Jurkat luminescence. To evaluate blocker availability to bind HLA-A*02 antigen, Jurkat cells were stained with 10 ug/mL streptavidin-PE-HLA-A*02-pMHC or streptavidin-APC-HLA-A*02-pMHC tetramer for 30 minutes at 4° C. in PBS with 1% BSA and characterized by flow cytometry (BD FACSCanto II). Histograms show all cells.

[0484] Results are shown in FIG. 8. In A2+ Jurkat effector cells in the absence of shRNA targeting the CDS of HLA-A*02:01:01:01 mRNA, activation of the CAR/TCR receptor occurred in the presence of target cells expressing the activator ligand and the HLA-A*02 blocker ligand, as well as in the presence of target cells expressing the activator ligand only. In contrast, A2− Jurkat effector cells showed significantly less CAR/TCR activation in the presence of target cells expressing the activator ligand and the HLA-A*02 blocker ligand. The A*02 blocker functions to inhibit T cell activation, which was observed in A2− Jurkat effector cells co-cultured with target cells expressing HLA-A*02 but not in A2+ Jurkat effector cells co-cultured with target cells expression HLA-A*02. This result indicates that expression of HLA-A*02 in Jurkat effector cells expressing an activator CAR/TCR and A*02 blocker interferes with A*02 inhibitory receptor function. In A2+ Jurkat effector cells transfected with shRNA targeting the CDS of HLA-A*02:01:01:01 mRNA, CAR/TCR activation was inhibited in the presence of target cells expressing the HLA-A*02 blocker ligand, but not in the presence of target cells lacking expression of the HLA-A*02 blocker ligand. This result indicates that shRNA targeting the CDS of HLA-A*02:01:01:01 mRNA can restore A*02 blocker function in the A2+ Jurkat cells.

[0485] In Jurkat cells stained with the fluorescently labeled probe that binds the A*02 blocker, FACS analysis shows the availability, or binding capacity, of the A*02 blocker receptor (inhibitory receptor). In A2− Jurkat cells, histograms from the FACS analysis shows staining of a subset of cells, indicating availability of the A*02 blocker receptor. In contrast, in A2+ Jurkat cells, there is a shift in the histogram, showing the population of cells has little to no A*02 blocker receptor availability and another ill-defined population with incomplete A*02 blocker receptor availability. However, transfection in A2+ Jurkat cells transfected with shRNA targeting the CDS of HLA-A*02:01:01:01 mRNA, the histogram is shifted and resembles the A2-population, indicating near complete availability of the A*02 blocker receptor.

[0486] Taken together, the results of these experiments show that in Jurkat cells expressing 1) a CAR or TCR that binds an activator ligand and 2) an engineered receptor that binds an HLA-A*02 blocker ligand (A*02 blocker), expression of HLA-A*02 interferes with A*02 blocker receptor function and A*02 blocker binding capacity. Further, the results show that shRNA mediated reduction of HLA-A*02 expression restores A*02 blocker function and binding capacity.

1. An immune cell comprising
an inhibitory receptor comprising a ligand binding domain specific to a class I major histocompatibility complex (MHC-I) molecule, or a peptide-MHC complex thereof,
wherein expression and/or function of a human leukocyte antigen (HLA) polypeptide, or an allele thereof, in said immune cell has been reduced or eliminated.

2. The immune cell of claim 1, wherein the HLA allele is an HLA-A, HLA-B, HLA-C, or HLA-E allele.

3. The immune cell of claim 2, wherein the HLA-A allele is an HLA-A*02, HLA-A*02:01, HLA-A*02:01:01, or HLA-A*02:01:01:01.

4. The immune cell of claim 3, wherein the HLA-A allele is HLA-A*02:01:01:01.

5. The immune cell of claim 1, comprising an interfering RNA, comprising a sequence complementary to a sequence of a HLA-A*02:01:01:01 mRNA.

6. The immune cell of claim 5, wherein the interfering RNA is capable of inducing RNAi-mediated degradation of the HLA-A*02:01:01:01 mRNA.

7. The immune cell of claim 6, wherein the interfering RNA is a short hairpin RNA (shRNA).

8. The immune cell of claim 7, wherein the shRNA comprises
a. a first sequence, having from 5′ to 3′ end a sequence complementary to the HLA-A*02:01:01:01 mRNA; and
b. a second sequence, having from 5′ to 3′ end a sequence complementary to the first sequence,
wherein the first sequence and the second sequence form the shRNA.

9. The immune cell of claim 8, wherein the HLA-A*02:01:01:01 mRNA sequence comprises a coding sequence.

10. The immune cell of claim 8, wherein the HLA-A*02:01:01:01 mRNA sequence comprises an untranslated region.

11. The immune cell of claim 1, wherein the first sequence is 18, 19, 20, 21, or 22 nucleotides.

12. The immune cell of claim 11, wherein the first sequence is complementary to a sequence selected from SEQ ID NOs: 400-8794.

13. The immune cell of claim 11, wherein the first sequence has GC content greater than or equal to 25% and less than 60%.

14. The immune cell of claim 13, wherein the first sequence is complementary to a sequence selected from SEQ ID NOs: 400-3990.

15. The immune cell of claim 13, wherein the first sequence does not comprise 4 nucleotides of the same base or a run of seven C or G bases.

16. The immune cell of claim 15, wherein the first sequence is complementary to a sequence selected from SEQ ID NOs: 400-3508.

17. The immune cell of claim 15, wherein the first sequence is selected from SEQ ID NOs: 400-678 or SEQ ID NOs: 400-485.

18. The immune cell of claim 8, wherein the first sequence and second sequence are present on a single stranded polynucleotide, wherein the first sequence and second sequence are separated by 4, 5, 6, 7, 8, 9, 10, 11, 12, 13, 14, or 15 nucleotides, wherein the 4, 5, 6, 7, 8, 9, 10, 11, 12, 13, 14, or 15 nucleotides form a loop region in the shRNA.

19. The immune cell of claim 18, wherein the loop region comprises a sequence selected from SEQ ID NOs: 8800-8813.

20. The immune cell of claim 1, wherein the shRNA further comprises a 5′ flank sequence and a 3′ flank sequence, wherein the 5′ flank sequence is joined to the 5′ end of the first sequence, and wherein the 3′ flank sequence is joined to the 3′ end of the second sequence.

21. The immune cell of claim 20, wherein the 5′ flank sequence is selected from SEQ ID NO: 8814-8816.

22. The immune cell of claim 20, wherein the 3′ flank sequence is selected from SEQ ID NO: 8817-8819.

23. The immune cell of claim 1, wherein the shRNA is operably linked to a promoter.

24. The immune cell of claim 23, wherein the promoter is a U6 promoter, a wild-type H1 promoter, a wild-type 7SK promoter, or an Ef1a promoter.

25. The immune cell of claim 24, wherein the promoter sequence is selected from SEQ ID NOs: 8826-8829.

26. The immune cell of claim 1, wherein the immune cell is a T cell, B cell, or Natural Killer (NK) cell.

27. The immune cell of claim 1, wherein the immune cell is autologous to a subject.

28. The immune cell of claim 1, wherein the immune cell is allogeneic to a subject.

29. The immune cell of claim 1, wherein the immune cell is non-natural.

30.-32. (canceled)

33. A pharmaceutical composition, comprising a plurality of the immune cells of claim 1.

34.-35. (canceled)

36. A method of treating cancer with an adoptive cell therapy, comprising administering to the subject a plurality of the immune cell of claim 1.

37. (canceled)

38. A vector comprising an interfering RNA, comprising an shRNA that targets a HLA-A*02:01:01:01 mRNA sequence, wherein the shRNA comprises
a. a first sequence, having from 5′ to 3′ a sequence complementary to the HLA-A*02:01:01:01 mRNA; and
b. a second sequence, having from 5′ to 3′ end a sequence complementary to the first sequence,
wherein the first sequence and the second sequence form the shRNA.

39.-62. (canceled)

63. A method of manufacturing a composition comprising immune cells with reduced autocrine binding/signaling comprising:
a. providing immune cells from a subject suffering from or at risk for cancer or a hematological malignancy; and
b. transducing and/or transfecting the immune cell with the vector of claim 38.

64.-65. (canceled)

66. A method of treating a subject in need thereof comprising:
a. providing immune cells from a subject suffering from or at risk for cancer or a hematological malignancy
b. transducing the immune cell with the vector of claim 38; and
c. administering the immune cell to the subject.

The application's sequence listing, which the Patent Office published only in electronic form, follows.

SEQUENCE LISTING (8919 sequences)

SEQ ID NO: 1 - protein, 45 aa, Artificial Sequence
  CD8alpha hinge
TTTPAPRPPTPAPTIASQPLSLRPEACRPAAGGAVHTRGLDFACD

SEQ ID NO: 2 - DNA, 135 bp, Artificial Sequence
  CD8alpha hinge
accacgacgccagcgccgcgaccaccaacaccggcgcccaccatcgcgtcgcagcccctgtccctgcgcccagaggcgtgccggccagcggcggggggcgcagtgcacacgagggggctggacttcgcctgtgat

SEQ ID NO: 3 - protein, 41 aa, Artificial Sequence
  CD28 hinge
CTIEVMYPPPYLDNEKSNGTIIHVKGKHLCPSPLFPGPSKP

SEQ ID NO: 4 - DNA, 123 bp, Artificial Sequence
  CD28 hinge
tgtaccattgaagttatgtatcctcctccttacctagacaatgagaagagcaatggaaccattatccatgtgaaagggaaacacctttgtccaagtcccctatttcccggaccttctaagccc

SEQ ID NO: 5 - protein, 27 aa, Artificial Sequence
  CD28 transmembrane domain
FWVLVVVGGVLACYSLLVTVAFIIFWV

SEQ ID NO: 6 - DNA, 81 bp, Artificial Sequence
  CD28 transmembrane domain
ttctgggtgctggtcgttgtgggcggcgtgctggcctgctacagcctgctggtgacagtggccttcatcatcttttgggtg

SEQ ID NO: 7 - protein, 25 aa, Artificial Sequence
  IL-2R beta transmembrane domain
IPWLGHLLVGLSGAFGFIILVYLLI

SEQ ID NO: 8 - DNA, 75 bp, Artificial Sequence
  IL-2R beta transmembrane domain
attccgtggctcggccacctcctcgtgggcctcagcggggcttttggcttcatcatcttagtgtacttgctgatc

SEQ ID NO: 9 - protein, 112 aa, Artificial Sequence
  CD3 zeta activation domain
RVKFSRSADAPAYKQGQNQLYNELNLGRREEYDVLDKRRGRDPEMGGKPRRKNPQEGLYNELQKDKMAEAYSEIGMKGERRRGKGHDGLYQGLSTATKDTYDALHMQALPPR

SEQ ID NO: 10 - DNA, 336 bp, Artificial Sequence
  CD3 zeta activation domain
agagtgaagttcagcaggagcgcagacgcccccgcgtacaagcagggccagaaccagctctataacgagctcaatctaggacgaagagaggagtacgatgttttggacaagcgtagaggccgggaccctgagatggggggaaagccgagaaggaagaaccctcaggaaggcctgtacaatgaactgcagaaagataagatggcggaggcctacagtgagattgggatgaaaggcgagcgccggaggggcaaggggcacgatggcctttaccagggactcagtacagccaccaaggacacctacgacgcccttcacatgcaggccctgccccctcgc

SEQ ID NO: 11 - protein, 43 aa, Artificial Sequence
  CD3 zeta activation domain
RVKFSRSADAPAYQQGQNQLYNELNLGRREEYDVLHMQALPPR

SEQ ID NO: 12 - DNA, 129 bp, Artificial Sequence
  CD3 zeta activation domain
agagtgaagttcagcaggagcgcagacgcccccgcgtaccagcagggccagaaccagctctataacgagctcaatctaggacgaagagaggagtacgatgttttgcacatgcaggccctgccccctcgc

SEQ ID NO: 13 - protein, 41 aa, Artificial Sequence
  CD28 co-stimulatory domain
RSKRSRLLHSDYMNMTPRRPGPTRKHYQPYAPPRDFAAYRS

SEQ ID NO: 14 - DNA, 123 bp, Artificial Sequence
  CD28 co-stimulatory domain
aggagcaagcggagcagactgctgcacagcgactacatgaacatgaccccccggaggcctggccccacccggaagcactaccagccctacgcccctcccagggatttcgccgcctaccggagc

SEQ ID NO: 15 - protein, 94 aa, Artificial Sequence
  IL-2-Rbeta intracellular domain
NCRNTGPWLKKVLKCNTPDPSKFFSQLSSEHGGDVQKWLSSPFPSSSFSPGGLAPEISPLEVLERDKVTQLLPLNTDAYLSLQELQGQDPTHLV

SEQ ID NO: 16 - DNA, 282 bp, Artificial Sequence
  IL-2-Rbeta intracellular domain
aactgcaggaacaccgggccatggctgaagaaggtcctgaagtgtaacaccccagacccctcgaagttcttttcccagctgagctcagagcatggaggcgacgtccagaagtggctctcttcgcccttcccctcatcgtccttcagccctggcggcctggcacctgagatctcgccactagaagtgctggagagggacaaggtgacgcagctgctccccctgaacactgatgcctacttgtctctccaagaactccagggtcaggacccaactcacttggtg

SEQ ID NO: 17 - protein, 4 aa, Artificial Sequence
  STAT5 recruitment motif
YLSL

SEQ ID NO: 18 - protein, 760 aa, Homo sapiens
MMDQARSAFSNLFGGEPLSYTRFSLARQVDGDNSHVEMKLAVDEEENADNNTKANVTKPKRCSGSICYGTIAVIVFFLIGFMIGYLGYCKGVEPKTECERLAGTESPVREEPGEDFPAARRLYWDDLKRKLSEKLDSTDFTSTIKLLNENSYVPREAGSQKDENLALYVENQFREFKLSKVWRDQHFVKIQVKDSAQNSVIIVDKNGRLVYLVENPGGYVAYSKAATVTGKLVHANFGTKKDFEDLYTPVNGSIVIVRAGKITFAEKVANAESLNAIGVLIYMDQTKFPIVNAELSFFGHAHLGTGDPYTPGFPSFNHTQFPPSRSSGLPNIPVQTISRAAAEKLFGNMEGDCPSDWKTDSTCRMVTSESKNVKLTVSNVLKEIKILNIFGVIKGFVEPDHYVVVGAQRDAWGPGAAKSGVGTALLLKLAQMFSDMVLKDGFQPSRSIIFASWSAGDFGSVGATEWLEGYLSSLHLKAFTYINLDKAVLGTSNFKVSASPLLYTLIEKTMQNVKHPVTGQFLYQDSNWASKVEKLTLDNAAFPFLAYSGIPAVSFCFCEDTDYPYLGTTMDTYKELIERIPELNKVARAAAEVAGQFVIKLTHDVELNLDYERYNSQLLSFVRDLNQYRADIKEMGLSLQWLYSARGDFFRATSRLTTDFGNAEKTDRFVMKKLNDRVMRVEYHFLSPYVSPKESPFRHVFWGSGSHTLPALLENLKLRKQNNGAFNETLFRNQLALATWTIQGAANALSGDVWDIDNEF

SEQ ID NO: 19 - DNA, 300 bp, Artificial Sequence
  CD3 epsilon intracellular domain
aagaatagaaaggccaaggccaagcctgtgacacgaggagcgggtgctggcggcaggcaaaggggacaaaacaaggagaggccaccacctgttcccaacccagactatgagcccatccggaaaggccagcgggacctgtattctggcctgaatcagcgcagaatcggcggaagcaggagcaagcggagcagactgctgcacagcgactacatgaacatgaccccccggaggcctggccccacccggaagcactaccagccctacgcccctcccagggatttcgccgcctaccggagctag

SEQ ID NO: 20 - DNA, 69 bp, Artificial SEquence
  TCR beta transmembrane domain
accatcctctatgagatcttgctagggaaggccaccttgtatgccgtgctggtcagtgccctcgtgctg

SEQ ID NO: 21 - protein, 4 aa, Artificial Sequence
  ITAM motif
  X (2)..(3): X can be any amino acid
YXXL

SEQ ID NO: 22 - DNA, 270 bp, Artificial Sequence
  CD3 gamma intracellular domain
ggacaggatggagttcgccagtcgagagcttcagacaagcagactctgttgcccaatgaccagctctaccagcccctcaaggatcgagaagatgaccagtacagccaccttcaaggaaaccagttgaggaggaatggcggaagcaggagcaagcggagcagactgctgcacagcgactacatgaacatgaccccccggaggcctggccccacccggaagcactaccagccctacgcccctcccagggatttcgccgcctaccggagctag

SEQ ID NO: 23 - protein, 10 aa, Artificial Sequence
  UTY peptide
  X (1)..(1): X is R or G
  X (6)..(6): X is E or A
  X (8)..(8): X is V or P
XESEEXSXSL

SEQ ID NO: 24 - protein, 9 aa, Artificial Sequence
  RPSY peptide
  X (8)..(8): X is V or L
TIRYPDPXI

SEQ ID NO: 25 - protein, 8 aa, Artificial Sequence
  UTY peptide
  X (5)..(5): X is H or R
  X (7)..(7): X is D or N
LPHNXTXL

SEQ ID NO: 26 - protein, 23 aa, Artificial Sequence
  TCR alpha transmembrane domain
VIGFRILLLKVAGFNLLMTLRLW

SEQ ID NO: 27 - DNA, 69 bp, Artificial Sequence
  TCR alpha transmembrane domain
gtgattgggttccgaatcctcctcctgaaagtggccgggtttaatctgctcatgacgctgcggctgtgg

SEQ ID NO: 28 - protein, 23 aa, Artificial Sequence
  TCR beta transmembrane domain
TILYEILLGKATLYAVLVSALVL

SEQ ID NO: 29 - protein, 21 aa, Artificial Sequence
  CD3 zeta transmembrane domain
LCYLLDGILFIYGVILTALFL

SEQ ID NO: 30 - protein, 89 aa, Artificial Sequence
  CD3 delta intracellular domain
GHETGRLSGAADTQALLRNDQVYQPLRDRDDAQYSHLGGNWARNKGGSRSKRSRLLHSDYMNMTPRRPGPTRKHYQPYAPPRDFAAYRS

SEQ ID NO: 31 - DNA, 269 bp, Artificial Sequence
  CD3 delta intracellular domain
ggacatgagactggaaggctgtctggggctgccgacacacaagctctgttgaggaatgaccaggtctatcagcccctccgagatcgagatgatgctcagtacagccaccttggaggaaactgggctcggaacaagggcggaagcaggagcaagcggagcagactgctgcacagcgactacatgaacatgaccccccggaggcctggccccacccggaagcactaccagccctacgcccctcccagggatttcgccgcctaccggagcta

SEQ ID NO: 32 - protein, 99 aa, Artificial Sequence
  CD3 epsilon intracellular domain
KNRKAKAKPVTRGAGAGGRQRGQNKERPPPVPNPDYEPIRKGQRDLYSGLNQRRIGGSRSKRSRLLHSDYMNMTPRRPGPTRKHYQPYAPPRDFAAYRS

SEQ ID NO: 33 - protein, 89 aa, Artificial Sequence
  CD3 gamma intracellular domain
GQDGVRQSRASDKQTLLPNDQLYQPLKDREDDQYSHLQGNQLRRNGGSRSKRSRLLHSDYMNMTPRRPGPTRKHYQPYAPPRDFAAYRS

SEQ ID NO: 34 - protein, 11 aa, Artificial Sequence
  SMCY peptide
  X (3)..(3): X is S or A
  X (8)..(8): X is R or Q
SPXVDKAXAEL

SEQ ID NO: 35 - protein, 10 aa, Artificial Sequence
  TCR beta intracellular domain
MAMVKRKDSR

SEQ ID NO: 36 - DNA, 30 bp, Artificial Sequence
  TCR beta intracellular domain
atggccatggtcaagagaaaggattccaga

SEQ ID NO: 37 - protein, 41 aa, Artificial Sequence; identical to SEQ ID NO: 13
  CD28 intracellular domain

SEQ ID NO: 38 - DNA, 123 bp, Artificial Sequence; identical to SEQ ID NO: 14
  CD28 intracellular domain

SEQ ID NO: 39 - protein, 42 aa, Artificial Sequence
  4-1BB intracellular domain
KRGRKKLLYIFKQPFMRPVQTTQEEDGCSCRFPEEEEGGCEL

SEQ ID NO: 40 - DNA, 126 bp, Artificial Sequence
  4-1BB intracellular domain
aaacggggcagaaagaaactcctgtatatattcaaacaaccatttatgaggccagtacaaactactcaagaggaagatggctgtagctgccgatttccagaagaagaagaaggaggatgtgaactg

SEQ ID NO: 41 - protein, 16 aa, Artificial Sequence
  HLA-A*02 CDR-L1
RSSQSIVHSNGNTYLE

SEQ ID NO: 42 - protein, 12 aa, Artificial Sequence
  HLA-A*02 CDR-L2
KVSNRFSGVPDR

SEQ ID NO: 43 - protein, 9 aa, Artificial Sequence
  HLA-A*02 CDR-L3
FQGSHVPRT

SEQ ID NO: 44 - protein, 12 aa, Artificial Sequence
  HLA-A*02 CDR-H1
ASGYTFTSYHIH

SEQ ID NO: 45 - protein, 18 aa, Artificial Sequence
  HLA-A*02 CDR-H2
WIYPGNVNTEYNEKFKGK

SEQ ID NO: 46 - protein, 9 aa, Artificial Sequence
  HLA-A*02 CDR-H3
EEITYAMDY

SEQ ID NO: 47 - protein, 16 aa, Artificial Sequence
  HLA-A*02 CDR-L1
RSSQSIVHSNGNTYLD

SEQ ID NO: 48 - protein, 12 aa, Artificial Sequence
  HLA-A*02 CDR-L2
KVSNRFSGVPDR

SEQ ID NO: 49 - protein, 9 aa, Artificial Sequence
  HLA-A*02 CDR-L3
MQGSHVPRT

SEQ ID NO: 50 - protein, 11 aa, Artificial Sequence
  HLA-A*02 CDR-H1
SGYTFTSYHMH

SEQ ID NO: 51 - protein, 17 aa, Artificial Sequence
  HLA-A*02 CDR-H2
WIYPGDGSTQYNEKFKG

SEQ ID NO: 52 - protein, 9 aa, Artificial Sequence
  HLA-A*02 CDR-H3
EGTYYAMDY

SEQ ID NO: 53 - protein, 247 aa, Artificial Sequence
  HLA-A*02 ScFv
DVLMTQTPLSLPVSLGDQASISCRSSQSIVHSNGNTYLEWYLQKPGQSPKLLIYKVSNRFSGVPDRFSGSGSGTDFTLKISRVEAEDLGVYYCFQGSHVPRTSGGGTKLEIKGGGGSGGGGSGGGGSGGQVQLQQSGPELVKPGASVRISCKASGYTFTSYHIHWVKQRPGQGLEWIGWIYPGNVNTEYNEKFKGKATLTADKSSSTAYMHLSSLTSEDSAVYFCAREEITYAMDYWGQGTSVTVSS

SEQ ID NO: 54 - protein, 247 aa, Artificial Sequence
  HLA-A*02 ScFv
QVQLVQSGAEVKKPGSSVKVSCKASGYTFTSYHIHWVRQAPGQGLEWMGWIYPGNVNTEYNEKFKGKATITADKSTSTAYMELSSLRSEDTAVYYCAREEITYAMDYWGQGTTVTVSSGGGGSGGGGSGGGGSGGEIVLTQSPGTLSLSPGERATLSCRSSQSIVHSNGNTYLEWYQQKPGQAPRLLIYKVSNRFSGIPDRFSGSGSGTDFTLTISRLEPEDFAVYYCFQGSHVPRTFGGGTKVEIK

SEQ ID NO: 55 - protein, 247 aa, Artificial Sequence
  HLA-A*02 ScFv
QVQLVQSGAEVKKPGSSVKVSCKASGYTFTSYHIHWVRQAPGQGLEWMGWIYPGNVNTEYNEKFKGKATITADKSTSTAYMELSSLRSEDTAVYYCAREEITYAMDYWGQGTTVTVSSGGGGSGGGGSGGGGSGGDIVMTQTPLSLPVTPGEPASISCRSSQSIVHSNGNTYLEWYLQKPGQSPQLLIYKVSNRFSGVPDRFSGSGSGTDFTLKISRVEAEDVGVYYCFQGSHVPRTFGGGTKVEIK

SEQ ID NO: 56 - protein, 247 aa, Artificial Sequence
  HLA-A*02 ScFv
EVQLVESGGGLVKPGGSLRLSCAASGYTFTSYHIHWVRQAPGKGLEWVGWIYPGNVNTEYNEKFKGRFTISRDDSKNTLYLQMNSLKTEDTAVYYCAREEITYAMDYWGQGTTVTVSSGGGGSGGGGSGGGGSGGDIQMTQSPSSLSASVGDRVTITCRSSQSIVHSNGNTYLEWYQQKPGKAPKLLIYKVSNRFSGVPSRFSGSGSGTDFTLTISSLQPEDFATYYCFQGSHVPRTFGGGTKVEIK

SEQ ID NO: 57 - protein, 247 aa, Artificial Sequence
  HLA-A*02 ScFv
QVQLVQSGAEVKKPGSSVKVSCKASGYTFTSYHIHWVRQAPGQGLEWIGWIYPGNVNTEYNEKFKGKATITADESTNTAYMELSSLRSEDTAVYYCAREEITYAMDYWGQGTLVTVSSGGGGSGGGGSGGGGSGGDIQMTQSPSTLSASVGDRVTITCRSSQSIVHSNGNTYLEWYQQKPGKAPKLLIYKVSNRFSGVPARFSGSGSGTEFTLTISSLQPDDFATYYCFQGSHVPRTFGQGTKVEVK

SEQ ID NO: 58 - protein, 247 aa, Artificial Sequence
  HLA-A*02 ScFv
QVQLVQSGAEVKKPGSSVKVSCKASGYTFTSYHMHWVRQAPGQGLEWIGYIYPGNVNTEYNEKFKGKATLTADKSTNTAYMELSSLRSEDTAVYFCAREEITYAMDYWGQGTLVTVSSGGGGSGGGGSGGGGSGGDVQMTQSPSTLSASVGDRVTITCSSSQSIVHSNGNTYMEWYQQKPGKAPKLLIYKVSNRFSGVPDRFSGSGSGTEFTLTISSLQPDDFATYYCHQGSHVPRTFGQGTKVEVK

SEQ ID NO: 59 - protein, 247 aa, Artificial Sequence
  HLA-A*02 ScFv
QVQLQQSGPELVKPGASVKMSCKASGYTFTSYHIQWVKQRPGQGLEWIGWIYPGDGSTQYNEKFKGKTTLTADKSSSTAYMLLSSLTSEDSAIYFCAREGTYYAMDYWGQGTSVTVSSGGGGSGGGGSGGGGSGGDVLMTQTPLSLPVSLGDQVSISCRSSQSIVHSNGNTYLEWYLQKPGQSPKLLIYKVSNRFSGVPDRFSGSGSGTDFTLKISRVEAEDLGVYYCFQGSHVPRTFGGGTKLEIK

SEQ ID NO: 60 - protein, 247 aa, Artificial Sequence
  HLA-A*02 ScFv
QLQLQESGPGLVKPSETLSLTCTVSGYTFTSYHIQWIRQPPGKGLEWIGWIYPGDGSTQYNEKFKGRATISVDTSKNQFSLNLDSVSAADTAIYYCAREGTYYAMDYWGKGSTVTVSSGGGGSGGGGSGGGGSGGDIQMTQSPSSLSASVGDRVTITCRSSQSIVHSNGNTYLEWYQQKPGKAPKLLIYKVSNRFSGVPSRFSGSGSGTDFTFTISSLQPEDIATYYCFQGSHVPRTFGPGTKVDIK

SEQ ID NO: 61 - protein, 247 aa, Artificial Sequence
  HLA-A*02 ScFv
EVQLVQSGAELKKPGSSVKVSCKASGYTFTSYHIQWVKQAPGQGLEWIGWIYPGDGSTQYNEKFKGKATLTVDKSTNTAYMELSSLRSEDTAVYYCAREGTYYAMDYWGQGTLVTVSSGGGGSGGGGSGGGGSGGDIQMTQSPSTLSASVGDRVTITCRSSQSIVHSNGNTYLEWYQQKPGKAPKLLIYKVSNRFSGVPSRFSGSGSGTDFTLTISSLQPDDFATYYCFQGSHVPRTFGQGTKVEVK

SEQ ID NO: 62 - protein, 247 aa, Artificial Sequence
  HLA-A*02 ScFv
QVQLVQSGAEVKKPGSSVKVSCKASGYTFTSYHIQWVRQAPGQGLEWMGWIYPGDGSTQYNEKFKGRVTITADKSTSTAYMELSSLRSEDTAVYYCAREGTYYAMDYWGQGTTVTVSSGGGGSGGGGSGGGGSGGEIVLTQSPGTLSLSPGERATLSCRSSQSIVHSNGNTYLEWYQQKPGQAPRLLIYKVSNRFSGIPDRFSGSGSGTDFTLTISRLEPEDFAVYYCFQGSHVPRTFGGGTKVEIK

SEQ ID NO: 63 - protein, 247 aa, Artificial Sequence
  HLA-A*02 ScFv
QVTLKQSGAEVKKPGSSVKVSCTASGYTFTSYHVSWVRQAPGQGLEWLGRIYPGDGSTQYNEKFKGKVTITADKSMDTSFMELTSLTSEDTAVYYCAREGTYYAMDLWGQGTLVTVSSGGGGSGGGGSGGGGSGGEIVLTQSPGTLSLSPGERATLSCRSSQSIVHSNGNTYLAWYQQKPGQAPRLLISKVSNRFSGVPDRFSGSGSGTDFTLTISRLEPEDFAVYYCQQGSHVPRTFGGGTKVEIK

SEQ ID NO: 64 - protein, 247 aa, Artificial Sequence
  HLA-A*02 ScFv
QVQLVQSGAEVKKPGASVKVSCKASGYTFTSYHMHWVRQAPGQRLEWMGWIYPGDGSTQYNEKFKGKVTITRDTSASTAYMELSSLRSEDTAVYYCAREGTYYAMDYWGQGTLVTVSSGGGGSGGGGSGGGGSGGDIVMTQTPLSLPVTPGEPASISCRSSQSIVHSNGNTYLDWYLQKPGQSPQLLIYKVSNRFSGVPDRFSGSGSGTDFTLKISRVEAEDVGVYYCMQGSHVPRTFGGGTKVEIK

SEQ ID NO: 65 - protein, 650 aa, Homo sapiens
MTPILTVLICLGLSLGPRTHVQAGHLPKPTLWAEPGSVITQGSPVTLRCQGGQETQEYRLYREKKTALWITRIPQELVKKGQFPIPSITWEHAGRYRCYYGSDTAGRSESSDPLELVVTGAYIKPTLSAQPSPVVNSGGNVILQCDSQVAFDGFSLCKEGEDEHPQCLNSQPHARGSSRAIFSVGPVSPSRRWWYRCYAYDSNSPYEWSLPSDLLELLVLGVSKKPSLSVQPGPIVAPEETLTLQCGSDAGYNRFVLYKDGERDFLQLAGAQPQAGLSQANFTLGPVSRSYGGQYRCYGAHNLSSEWSAPSDPLDILIAGQFYDRVSLSVQPGPTVASGENVTLLCQSQGWMQTFLLTKEGAADDPWRLRSTYQSQKYQAEFPMGPVTSAHAGTYRCYGSQSSKPYLLTHPSDPLELVVSGPSGGPSSPTTGPTSTSGPEDQPLTPTGSDPQSGLGRHLGVVIGILVAVILLLLLLLLLFLILRHRRQGKHWTSTQRKADFQHPAGAVGPEPTDRGLQWRSSPAADAQEENLYAAVKHTQPEDGVEMDTRSPHDEDPQAVTYAEVKHSRPRREMASPPSPLSGEFLDTKDRQAEEDRQMDTEAAASEAPQDVTYAQLHSLTLRREATEPPPSQEGPSPAVPSIYATLAIH

SEQ ID NO: 66 - DNA, 3229 bp, Homo sapiens
aaatgagttttaaaaaggcttgtccaggaagcacatatgggagctggtcactctgcattttgggccctcctggaggtgtttagaccttccgagagagaaactgagacacatgagagggaagaaatgactcagtggtgagaccctgtggagtcccacccacaaccagcacactgtgacccactgcacaaacctctagcccacagctcacttcctcctttaagaagagaagagaaaagaggagaggagaggaggaacagaaaagaaaagaaaagaaaaagtgggaaacaaataatctaagaatgaggagaaagcaagaagagtgacccccttgtgggcactccattggttttatggcgcctctactttctggagtttgtgtaaaacaaaaatattatggtctttgtgcacatttacatcaagctcagcctgggcggcacagccagatgcgagatgcgtctctgctgatctgagtctgcctgcagcatggacctgggtcttccctgaagcatctccagggctggagggacgactgccatgcaccgagggctcatccatccacagagcagggcagtgggaggagacgccatgacccccatcctcacggtcctgatctgtctcgggctgagtctgggcccccggacccacgtgcaggcagggcacctccccaagcccaccctctgggctgaaccaggctctgtgatcacccaggggagtcctgtgaccctcaggtgtcaggggggccaggagacccaggagtaccgtctatatagagaaaagaaaacagcaccctggattacacggatcccacaggagcttgtgaagaagggccagttccccatcccatccatcacctgggaacacacagggcggtatcgctgttactatggtagcgacactgcaggccgctcagagagcagtgaccccctggagctggtggtgacaggagcctacatcaaacccaccctctcagcccagcccagccccgtggtgaactcaggagggaatgtaaccctccagtgtgactcacaggtggcatttgatggcttcattctgtgtaaggaaggagaagatgaacacccacaatgcctgaactcccagccccatgcccgtgggtcgtcccgcgccatcttctccgtgggccccgtgagcccgagtcgcaggtggtggtacaggtgctatgcttatgactcgaactctccctatgagtggtctctacccagtgatctcctggagctcctggtcctaggtgtttctaagaagccatcactctcagtgcagccaggtcctatcgtggcccctgaggagaccctgactctgcagtgtggctctgatgctggctacaacagatttgttctgtataaggacggggaacgtgacttccttcagctcgctggcgcacagccccaggctgggctctcccaggccaacttcaccctgggccctgtgagccgctcctacgggggccagtacagatgctacggtgcacacaacctctcctccgagtggtcggcccccagcgaccccctggacatcctgatcgcaggacagttctatgacagagtctccctctcggtgcagccgggccccacggtggcctcaggagagaacgtgaccctgctgtgtcagtcacagggatggatgcaaactttccttctgaccaaggagggggcagctgatgacccatggcgtctaagatcaacgtaccaatctcaaaaataccaggctgaattccccatgggtcctgtgacctcagcccatgcggggacctacaggtgctacggctcacagagctccaaaccctacctgctgactcaccccagtgaccccctggagctcgtggtctcaggaccgtctgggggccccagctccccgacaacaggccccacctccacatctggccctgaggaccagcccctcacccccaccgggtcggatccccagagtggtctgggaaggcacctgggggttgtgatcggcatcttggtggccgtcatcctactgctcctcctcctcctcctcctcttcctcatcctccgacatcgacgtcagggcaaacactggacatcgacccagagaaaggctgatttccaacatcctgcaggggctgtggggccagagcccacagacagaggcctgcagtggaggtccagcccagctgccgatgcccaggaagaaaacctctatgctgccgtgaagcacacacagcctgaggatggggtggagatggacactcggagcccacacgatgaagacccccaggcagtgacgtatgccgaggtgaaacactccagacctaggagagaaatggcctctcctccttccccactgtctggggaattcctggacacaaaggacagacaggcggaagaggacaggcagatggacactgaggctgctgcatctgaagccccccaggatgtgacctacgcccagctgcacagcttgaccctcagacgggaggcaactgagcctcctccatcccaggaagggccctctccagctgtgcccagcatctacgccactctggccatccactagcccagggggggacgcagaccccacactccatggagtctggaatgcatgggagctgcccccccagtggacaccattggaccccacccagcctggatctaccccaggagactctgggaacttttaggggtcactcaattctgcagtataaataactaatgtctctacaattttgaaataaagcaacagacttctcaataatcaatgaagtagctgagaaaactaagtcagaaagtgcattaaactgaatcacaatgtaaatattacacatcaagcgatgaaactggaaaactacaagccacgaatgaatgaattaggaaagaaaaaaagtaggaaatgaatgatcttggctttcctataagaaatttagggcagggcacggtggctcacgcctgtaattccagcactttgggaggccgaggcgggcagatcacgagttcaggagatcgagaccatcttggccaacatggtgaaaccctgtctctcctaaaaatacaaaaattagctggatgtggtggcagtgcctgtaatcccagctatttgggaggctgaggcaggagaatcgcttgaaccagggagtcagaggtttcagtgagccaagatcgcaccactgctctccagcctggcgacagagggagactccatctcaaattaaaaaaaaaaaaaaaaaagaaagaaaaaaaaaaaaaaaaaa

SEQ ID NO: 67 - protein, 6 aa, Artificial Sequence
  ITIM
NLYAAV

SEQ ID NO: 68 - protein, 6 aa, Artificial Sequence
  ITIM
VTYAEV

SEQ ID NO: 69 - protein, 6 aa, Artificial Sequence
  ITIM
VTYAQL

SEQ ID NO: 70 - protein, 6 aa, Artificial Sequence
  ITIM
SIYATL

SEQ ID NO: 71 - protein, 35 aa, Artificial Sequence
  ITIM 1-2
NLYAAVKHTQPEDGVEMDTRSPHDEDPQAVTYAEV

SEQ ID NO: 72 - protein, 58 aa, Artificial Sequence
  ITIM 2-3
VTYAEVKHSRPRREMASPPSPLSGEFLDTKDRQAEEDRQMDTEAAASEAPQDVTYAQL

SEQ ID NO: 73 - protein, 36 aa, Artificial Sequence
  ITIM 3-4
VTYAQLHSLTLRREATEPPPSQEGPSPAVPSIYATL

SEQ ID NO: 74 - protein, 87 aa, Artificial Sequence
  ITIM 1-3
NLYAAVKHTQPEDGVEMDTRSPHDEDPQAVTYAEVKHSRPRREMASPPSPLSGEFLDTKDRQAEEDRQMDTEAAASEAPQDVTYAQL

SEQ ID NO: 75 - protein, 88 aa, Artificial Sequence
  ITIM 2-4
VTYAEVKHSRPRREMASPPSPLSGEFLDTKDRQAEEDRQMDTEAAASEAPQDVTYAQLHSLTLRREATEPPPSQEGPSPAVPSIYATL

SEQ ID NO: 76 - protein, 117 aa, Artificial Sequence
  ITIM 1-4
NLYAAVKHTQPEDGVEMDTRSPHDEDPQAVTYAEVKHSRPRREMASPPSPLSGEFLDTKDRQAEEDRQMDTEAAASEAPQDVTYAQLHSLTLRREATEPPPSQEGPSPAVPSIYATL

SEQ ID NO: 77 - protein, 20 aa, Artificial Sequence
  D3D4 domain
YGSQSSKPYLLTHPSDPLEL

SEQ ID NO: 78 - protein, 43 aa, Artificial Sequence
  short hinge
VVSGPSGGPSSPTTGPTSTSGPEDQPLTPTGSDPQSGLGRHLG

SEQ ID NO: 79 - protein, 86 aa, Artificial Sequence
  hinge- transmembrane
YGSQSSKPYLLTHPSDPLELVVSGPSGGPSSPTTGPTSTSGPEDQPLTPTGSDPQSGLGRHLGVVIGILVAVILLLLLLLLLFLIL

SEQ ID NO: 80 - protein, 190 aa, Artificial Sequence
  hinge-transmembrane-intracellular domain
VVIGILVAVILLLLLLLLLFLILRHRRQGKHWTSTQRKADFQHPAGAVGPEPTDRGLQWRSSPAADAQEENLYAAVKHTQPEDGVEMDTRSPHDEDPQAVTYAEVKHSRPRREMASPPSPLSGEFLDTKDRQAEEDRQMDTEAAASEAPQDVTYAQLHSLTLRREATEPPPSQEGPSPAVPSIYATLAIH

SEQ ID NO: 81 - protein, 167 aa, Artificial Sequence
  LILRB1 intracellular domain
RHRRQGKHWTSTQRKADFQHPAGAVGPEPTDRGLQWRSSPAADAQEENLYAAVKHTQPEDGVEMDTRSPHDEDPQAVTYAEVKHSRPRREMASPPSPLSGEFLDTKDRQAEEDRQMDTEAAASEAPQDVTYAQLHSLTLRREATEPPPSQEGPSPAVPSIYATLAIH

SEQ ID NO: 82 - protein, 253 aa, Artificial Sequence
  LILRB1 hinge-transmemebrane-intracellular domain
YGSQSSKPYLLTHPSDPLELVVSGPSGGPSSPTTGPTSTSGPEDQPLTPTGSDPQSGLGRHLGVVIGILVAVILLLLLLLLLFLILRHRRQGKHWTSTQRKADFQHPAGAVGPEPTDRGLQWRSSPAADAQEENLYAAVKHTQPEDGVEMDTRSPHDEDPQAVTYAEVKHSRPRREMASPPSPLSGEFLDTKDRQAEEDRQMDTEAAASEAPQDVTYAQLHSLTLRREATEPPPSQEGPSPAVPSIYATLAIH

SEQ ID NO: 83 - protein, 233 aa, Artificial Sequence
  LILRB1 hinge-TM-intracellular domain
VVSGPSGGPSSPTTGPTSTSGPEDQPLTPTGSDPQSGLGRHLGVVIGILVAVILLLLLLLLLFLILRHRRQGKHWTSTQRKADFQHPAGAVGPEPTDRGLQWRSSPAADAQEENLYAAVKHTQPEDGVEMDTRSPHDEDPQAVTYAEVKHSRPRREMASPPSPLSGEFLDTKDRQAEEDRQMDTEAAASEAPQDVTYAQLHSLTLRREATEPPPSQEGPSPAVPSIYATLAIH

SEQ ID NO: 84 - protein, 63 aa, Artificial Sequence
  LILRB1 hinge domain
YGSQSSKPYLLTHPSDPLELVVSGPSGGPSSPTTGPTSTSGPEDQPLTPTGSDPQSGLGRHLG

SEQ ID NO: 85 - protein, 23 aa, Artificial Sequence
  LILRB1 transmembrane domain
VVIGILVAVILLLLLLLLLFLIL

SEQ ID NO: 86 - protein, 237 aa, Artificial Sequence
  MSLN binding domain
QVQLVQSGAEVEKPGASVKVSCKASGYTFTDYYMHWVRQAPGQGLEWMGWINPNSGGTNYAQKFQGRVTMTRDTSISTAYMELSRLRSDDTAVYYCASGWDFDYWGQGTLVTVSSGGGGSGGGGSGGGGSGGDIVMTQSSSLSASVGDRVTITCRASQSIRYYLSWYQQKPGKAPKLLIYTASILQNGVPSRFSGSGSGTDFTLTISSLQPEDFATYYCLQTYTTPDFGPGTKVEIK

SEQ ID NO: 87 - DNA, 711 bp, Artificial Sequence
  MSLN binding domain
caggtgcagctggtgcagtctggggctgaggtggagaagcctggggcctcagtgaaggtctcctgcaaggcttctggatacaccttcaccgactactatatgcactgggtgcgacaggcccctggacaagggcttgagtggatgggatggatcaaccctaacagtggtggcacaaactatgcacagaagtttcagggcagggtcaccatgaccagggacacgtccatcagcacagcctacatggagctgagcaggctgagatctgacgacacggccgtgtattactgtgcgtctggctgggactttgactactggggccagggaaccctggtcaccgtgtcctcaggcggaggtggaagcggagggggaggatctggcggcggaggaagcggaggcgacatcgtgatgacccagtcttcctccctgtctgcatctgtcggagacagagtcaccatcacttgccgggccagtcagagcattaggtactatttaagttggtatcagcagaaaccaggaaaagcccctaagctcctgatctatactgcatccattttacaaaatggggtcccatcaaggttcagtggcagtggatctgggacagatttcactctcaccatcagcagcctgcaacctgaggattttgcaacttattactgcctccagacttacactactccggactttggcccagggaccaaggtggaaatcaaa

SEQ ID NO: 88 - protein, 246 aa, Artificial Sequence
  MSLN binding domain
QVQLVQSGAEVRAPGASVKISCKASGFTFRGYYIHWVRQAPGQGLEWMGIINPSGGSRAYAQKFQGRVTMTRDTSTSTVYMELSSLRSDDTAMYYCARTASCGGDCYYLDYWGQGTLVTVSSGGGGSGGGGSGGGGSGGDIQMTQSPPTLSASVGDRVTITCRASENVNIWLAWYQQKPGKAPKLLIYKSSSLASGVPSRFSGSGSGAEFTLTISSLQPDDFATYYCQQYQSYPLTFGGGTKVEIK

SEQ ID NO: 89 - DNA, 738 bp, Artificial Sequence
  MSLN binding domain
caggtgcagctggtgcagtctggggctgaggtgagggcacctggggcctcagtgaagatttcctgcaaggcttctggattcaccttcagaggctactatatccactgggtgcgacaggcccctggacaagggcttgagtggatgggaatcatcaaccctagtggtggtagcagagcctacgcacagaagttccagggcagggtcaccatgaccagggacacttccacgagcacagtctacatggagctgagcagcctgagatctgacgacacggccatgtattactgtgcgagaaccgcaagttgtggtggtgactgctactaccttgactactggggccagggaaccctggtcaccgtgtcctcaggcggaggtggaagcggagggggaggatctggcggcggaggaagcggaggcgacatccagatgacccagtctcctcccaccctgtctgcatctgtaggagacagagtcaccatcacttgccgggccagtgagaatgttaatatctggttggcctggtatcagcagaaaccagggaaagcccctaagctcctgatctataagtcatccagtttagcaagtggggtcccatcaaggttcagtggcagtggatctggggcagaattcactctcaccatcagcagcctgcagcctgatgattttgcaacttattactgccaacagtatcaaagttaccccctcactttcggcggagggaccaaggtggaaatcaaa

SEQ ID NO: 90 - protein, 242 aa, Artificial Sequence
  MSLN binding domain
QVQLVQSGAEVKKPGASVKVSCKASGYSFTGYTMNWVRQAPGQRLEWMGLITPYNGASSYNQKFRGRVTITRDTSASTAYMELSSLRSEDTAVYYCARGGYDGRGFDYWGQGTTVTVSSGGGGSGGGGSGGGGSGGDIQMTQSPSSLSASVGDRVTITCSASSSVSYMHWYQQKPGKAPKRLIYDTSKLASGVPSRFSGSGSGTEFTLTISSLQPEDFATYYCQQWSGYPLTFGQGTKLEIK

SEQ ID NO: 91 - DNA, 726 bp, Artificial Sequence
  MSLN binding domain
caggtgcagctggtgcagtctggggctgaggtgaagaagcctggggcctcagtgaaggtttcctgcaaggcttctggatactcattcaccggctacaccatgaactgggtgaggcaggcccctggacaaagacttgagtggatgggacttatcaccccttacaatggtgcttctagctacaaccagaagttcaggggcagggtcacaatcactagagacacgtcagccagcacagcctacatggagctctccagcctgagatctgaagacactgcagtctattactgtgcaagggggggttacgacgggaggggttttgactactggggccagggaaccacggtcaccgtgtcctcaggcggaggtggaagcggagggggaggatctggcggcggaggaagcggaggcgacatccagatgacccagtctccttcaagcttgtctgcatctgtaggagacagggtcaccatcacttgcagtgccagctcaagtgtaagttacatgcactggtatcagcagaaaccaggcaaggcccctaagagattgatctatgacacatccaaattagcaagtggggtcccaagtcgcttcagtggcagtggatctgggaccgaattcactctcaccatcagcagcttgcagcctgaggattttgcaacttattactgccagcagtggagtggttaccctctcacgttcggtcaggggacaaagttggaaatcaaa

SEQ ID NO: 92 - protein, 242 aa, Artificial Sequence
  MSLN binding domain
QVQLQQSGPELEKPGASVKISCKASGYSFTGYTMNWVKQSHGKSLEWIGLITPYNGASSYNQKFRGKATLTVDKSSSTAYMDLLSLTSEDSAVYFCARGGYDGRGFDYWGQGTTVTVSSGGGGSGGGGSGGGGSGGDIELTQSPAIMSASPGEKVTMTCSASSSVSYMHWYQQKSGTSPKRWIYDTSKLASGVPGRFSGSGSGNSYSLTISSVEAEDDATYYCQQWSGYPLTFGAGTKLEIK

SEQ ID NO: 93 - DNA, 726 bp, Artificial Sequence
  MSLN binding domain
caggtgcagctgcagcagtctgggcctgagctggagaagcctggggcctcagtgaagatttcctgcaaggcttctggatactcattcaccggctacaccatgaactgggtgaagcagagccatggaaaaagccttgagtggattggacttatcaccccttacaatggtgcttctagctacaaccagaagttcaggggcaaggccacattaactgtagacaagtcatccagcacagcctacatggacctcctcagcctgacatctgaagactctgcagtctatttctgtgcaagggggggttacgacgggaggggttttgactactggggccagggaaccacggtcaccgtgtcctcaggcggaggtggaagcggagggggaggatctggcggcggaggaagcggaggcgacatcgagctcacccagtctcctgcaatcatgtctgcatctccaggagagaaggtcaccatgacttgcagtgccagctcaagtgtaagttacatgcactggtatcagcagaaatcaggcacctcccctaagagatggatctatgacacatccaaattggcaagtggggtcccaggtcgcttcagtggcagtggatctgggaactcttactctctcaccatcagcagcgtggaggctgaggatgatgcaacttattactgccagcagtggagtggttaccctctcacgttcggtgctgggacaaagttggaaatcaaa

SEQ ID NO: 94 - protein, 243 aa, Artificial Sequence
  CEA binding domain
QVQLQQSGAELVRSGTSVKLSCTASGFNIKDSYMHWLRQGPEQGLEWIGWIDPENGDTEYAPKFQGKATFTTDTSSNTAYLQLSSLTSEDTAVYYCNEGTPTGPYYFDYWGQGTTVTVSSGGGGSGGGGSGGGGSGGENVLTQSPAIMSASPGEKVTITCSASSSVSYMHWFQQKPGTSPKLWIYSTSNLASGVPARFSGSGSGTSYSLTISRMEAEDAATYYCQQRSSYPLTFGAGTKLELK

SEQ ID NO: 95 - DNA, 729 bp, Artificial Sequence
  CEA binding domain
caggtccagctgcagcagtctggggcagagcttgtgaggtcagggacctcagtcaagttgtcctgcacagcttctggcttcaacattaaagactcctatatgcactggttgaggcaggggcctgaacagggcctggagtggattggatggattgatcctgagaatggtgatactgaatatgccccgaagttccagggcaaggccacttttactacagacacatcctccaacacagcctacctgcagctcagcagcctgacatctgaggacactgccgtctattactgtaatgaagggacaccgacagggccatactattttgactactggggtcaaggaaccacagtcaccgtgtcctcaggcggaggtggaagcggagggggaggatctggcggcggaggaagcggaggcgagaacgttctcacccagtctccagcaatcatgtctgcatctccaggggagaaggtcaccataacctgcagtgccagctcaagtgtaagttacatgcactggttccagcagaagccaggcacttctcccaaactctggatttatagcacatccaacctggcttctggagtccctgctcgcttcagtggcagtggatctgggacctcttactctctcacaatcagccgaatggaggctgaagatgctgccacttattactgccagcaaaggagtagttacccgctcacgttcggtgctgggaccaagctggagctgaaa

SEQ ID NO: 96 - protein, 243 aa, Artificial Sequence
  CEA binding domain
QVQLVQSGAEVKKPGASVKVSCKASGFNIKDSYMHWVRQAPGQGLEWMGWIDPENGDTEYAPKFQGRVTMTTDTSTSTAYMELRSLRSDDTAVYYCNEGTPTGPYYFDYWGQGTTVTVSSGGGGSGGGGSGGGGSGGEIVLTQSPATLSLSPGERATLSCSASSSVSYMHWYQQKPGLAPRLLIYSTSNLASGIPDRFSGSGSGTDFTLTISRLEPEDFAVYYCQQRSSYPLTFGQGTKLEIK

SEQ ID NO: 97 - DNA, 729 bp, Artificial Sequence
  CEA binding domain
caggtccagctggtgcagtctggggcagaggtgaagaaaccaggggcctcagtcaaggtgtcctgcaaagcttctggcttcaacattaaagactcctatatgcactgggtgaggcaggcgcctggacagggcctggagtggatgggatggattgatcctgagaatggtgatactgaatatgccccgaagttccagggcagggtcactatgactacagacacatccacctccacagcctacatggagctcaggagcctgagatctgacgacactgccgtctattactgtaatgaagggacaccgacagggccatactattttgactactggggtcaaggaaccacagtcaccgtgtcctcaggcggaggtggaagcggagggggaggatctggcggcggaggaagcggaggcgagatcgttctcacccagtctccagcaaccttgtctctgtctccaggggagagggccaccctaagctgcagtgccagctcaagtgtaagttacatgcactggtaccagcagaagccaggccttgctcccagactcctgatttatagcacatccaacctggcttctggaatccctgatcgcttcagtggcagtggatctgggaccgatttcactctcacaatcagccgactggagcctgaagatttcgccgtttattactgccagcaaaggagtagttacccgctcacgttcggtcaggggaccaagctggagatcaaa

SEQ ID NO: 98 - protein, 243 aa, Artificial Sequence
  CEA binding domain
EVQLAESGGGLVQPGGSLRLSCAASGFTFSSDAMSWVRQAPGKGLEWVSAISGSGGSTYYADSVKGRFTISRDNSKNTLYLQMNSLRAEDTAVYYCAKSNEFLFDYWGQGTLVTVSSGGGGSGGGGSGGGGSGGSSELTQDPAVSVALGQTVRITCQGDSLRSSYASWYRQRPGQAPVLVIYGKNNRPSGIPDRFSGSSSGNTASLTITGAQAEDEADYYWNSSYAWLPYVVFGGGTKLTVLG

SEQ ID NO: 99 - DNA, 729 bp, Artificial Sequence
  CEA binding domain
gaggtgcagctggcggagtctgggggaggcttggtacagcctggggggtccctgagactctcctgtgcagcctctggattcacctttagcagcgatgccatgagctgggtccgccaggctccagggaaggggctggagtgggtctcagctattagtggtagtggtggtagcacatactacgcagactccgtgaagggccggttcaccatctccagagacaattccaagaacacgctgtatctgcaaatgaacagcctgagagccgaggacacggccgtgtattactgtgcaaagtctaatgagtttctttttgactactggggccaaggtaccctggtcaccgtgtcgagtggcggaggtggaagcggagggggaggatctggcggcggaggaagcggaggctcttctgagctgactcaggaccctgctgtgtctgtggccttgggacagacagtcaggatcacatgccaaggagacagcctcagaagctcttatgcaagctggtaccggcagaggccaggacaggcccctgtacttgtcatctatggtaaaaacaaccggccctcagggatcccagaccgattctctggctccagctcaggaaacacagcttccttgaccatcactggggctcaggcggaagatgaggctgactattactggaactccagctacgcttggctgccctacgtggtattcggcggagggaccaagctgaccgtcctaggt

SEQ ID NO: 100 - protein, 243 aa, Artificial Sequence
  CEA binding domain
QVQLEQSGAGVVKPGASVKLSCKASGFNIKDSYMHWLRQGPGQRLEWIGWIDPENGDTEYAPKFQGKATFTTDTSANTAYLGLSSLRPEDTAVYYCNEGTPTGPYYFDYWGQGTLVTVSSGGGGSGGGGSGGGGSGGENVLTQSPSSMSVSVGDRVNIACSASSSVPYMHWLQQKPGKSPKLLIYLTSNLASGVPSRFSGSGSGTDYSLTISSVQPEDAATYYCQQRSSYPLTFGGGTKLEIK

SEQ ID NO: 101 - DNA, 729 bp, Artificial Sequence
  CEA binding domain
caggtccagctggagcagtctggggcaggggttgtgaagccaggggcctcagtcaagttgtcctgcaaagcttctggcttcaacattaaagactcctatatgcactggttgaggcaggggcctggacagcgcctggagtggattggatggattgatcctgagaatggtgatactgaatatgccccgaagttccagggcaaggccacttttactacagacacatccgccaacacagcctacctggggctcagcagcctgagacctgaggacactgccgtctattactgtaatgaagggacaccgacagggccatactattttgactactggggtcaaggaaccctagtcaccgtgtcctcaggcggaggtggaagcggagggggaggatctggcggcggaggaagcggaggcgagaacgttctcacccagtctccaagctctatgtctgtatctgtcggggacagggtcaacatcgcctgcagtgccagctcaagtgtaccttacatgcactggctccagcagaagccaggcaaatctcccaaactcctgatttatctcacatccaacctggcttctggagtccctagccgcttcagtggcagtggatctgggaccgattactctctcacaatcagctcagtgcagcctgaagatgctgccacttattactgccagcaaaggagtagttacccgctcacgttcggtggtgggaccaagctggagatcaaa

SEQ ID NO: 102 - protein, 249 aa, Artificial Sequence
  EGFR ScFv
QVQLVESGGGVVQPGRSLRLSCAASGFTFSTYGMHWVRQAPGKGLEWVAVIWDDGSYKYYGDSVKGRFTISRDNSKNTLYLQMNSLRAEDTAVYYCARDGITMVRGVMKDYFDYWGQGTLVTVSSGGGGSGGGGSGGGGSGGAIQLTQSPSSLSASVGDRVTITCRASQDISSALVWYQQKPGKAPKLLIYDASSLESGVPSRFSGSESGTDFTLTISSLQPEDFATYYCQQFNSYPLTFGGGTKVEIK

SEQ ID NO: 103 - DNA, 747 bp, Artificial Sequence
  EGFR ScFv
caggtgcagctggtggagtctgggggaggcgtggtccagcctgggaggtccctgagactctcctgtgcagcgtctggattcaccttcagtacctatggcatgcactgggtccgccaggctccaggcaaggggctggagtgggtggcagttatatgggatgatggaagttataaatactatggagactccgtgaagggccgattcaccatctccagagacaattccaagaacacgctgtatctgcaaatgaacagcctgagagccgaggacacggctgtgtattactgtgcgagagatggtattactatggttcggggagttatgaaggactactttgactactggggccagggaaccctggtcaccgtctcctcaggcggaggtggaagcggagggggaggatctggcggcggaggaagcggaggcgccatccagttgacccagtctccatcctccctgtctgcatctgtaggagacagagtcaccatcacttgccgggcaagtcaggacattagcagtgctttagtctggtatcagcagaaaccagggaaagctcctaagctcctgatctatgatgcctccagtttggaaagtggggtcccatcaaggttcagcggcagtgaatctgggacagatttcactctcaccatcagcagcctgcagcctgaagattttgcaacttattactgtcaacagtttaatagttacccgctcactttcggcggagggaccaaggtggagatcaaa

SEQ ID NO: 104 - protein, 249 aa, Artificial Sequence
  EGFR ScFv
AIQLTQSPSSLSASVGDRVTITCRASQDISSALVWYQQKPGKAPKLLIYDASSLESGVPSRFSGSESGTDFTLTISSLQPEDFATYYCQQFNSYPLTFGGGTKVEIKGGGGSGGGGSGGGGSGGQVQLVESGGGVVQPGRSLRLSCAASGFTFSTYGMHWVRQAPGKGLEWVAVIWDDGSYKYYGDSVKGRFTISRDNSKNTLYLQMNSLRAEDTAVYYCARDGITMVRGVMKDYFDYWGQGTLVTVSS

SEQ ID NO: 105 - DNA, 747 bp, Artificial Sequence
  EGFR ScFv
gccatccagttgacccagtctccatcctccctgtctgcatctgtaggagacagagtcaccatcacttgccgggcaagtcaggacattagcagtgctttagtctggtatcagcagaaaccagggaaagctcctaagctcctgatctatgatgcctccagtttggaaagtggggtcccatcaaggttcagcggcagtgaatctgggacagatttcactctcaccatcagcagcctgcagcctgaagattttgcaacttattactgtcaacagtttaatagttacccgctcactttcggcggagggaccaaggtggagatcaaaggcggaggtggaagcggagggggaggatctggcggcggaggaagcggaggccaggtgcagctggtggagtctgggggaggcgtggtccagcctgggaggtccctgagactctcctgtgcagcgtctggattcaccttcagtacctatggcatgcactgggtccgccaggctccaggcaaggggctggagtgggtggcagttatatgggatgatggaagttataaatactatggagactccgtgaagggccgattcaccatctccagagacaattccaagaacacgctgtatctgcaaatgaacagcctgagagccgaggacacggctgtgtattactgtgcgagagatggtattactatggttcggggagttatgaaggactactttgactactggggccagggaaccctggtcaccgtctcctca

SEQ ID NO: 106 - protein, 247 aa, Artificial Sequence
  EGFR ScFv
QIQLVQSGPELKKPGETVKISCKASGYTFTEYPIHWVKQAPGKGFKWMGMIYTDIGKPTYAEEFKGRFAFSLETSASTAYLQINNLKNEDTATYFCVRDRYDSLFDYWGQGTTLTVSSGGGGSGGGGSGGGGSGGDVVMTQTPLSLPVSLGDQASISCRSSQSLVHSNGNTYLHWYLQKPGQSPKLLIYKVSNRFSGVPDRFSGSGSGTDFTLKISRVEAEDLGVYFCSQSTHVPWTFGGGTKLEIK

SEQ ID NO: 107 - DNA, 741 bp, Artificial Sequence
  EGFR ScFv
cagatccagttggtgcagtctggacctgagctgaagaagcctggagagacagtcaagatctcctgcaaggcctctgggtataccttcacagaatatccaatacactgggtgaagcaggctccaggaaagggtttcaagtggatgggcatgatatacaccgacattggaaagccaacatatgctgaagagttcaagggacggtttgccttctctttggagacctctgccagcactgcctatttgcagatcaacaacctcaagaatgaggacacggctacatatttctgtgtaagagatcgatatgattccctctttgactactggggccaaggcaccactctcacagtctcctcaggcggaggtggaagcggagggggaggatctggcggcggaggaagcggaggcgatgttgtgatgacccaaactccactctccctgcctgtcagtcttggagatcaagcctccatctcttgcagatctagtcagagccttgtacacagtaatggaaacacctatttacattggtacctgcagaagccaggccagtctccaaagctcctgatctacaaagtttccaaccgattttctggggtcccagacaggttcagtggcagtggatcagggacagatttcacactcaagatcagcagagtggaggctgaggatctgggagtttatttctgctctcaaagtacacatgttccgtggacgttcggtggaggcaccaagctggaaatcaaa

SEQ ID NO: 108 - protein, 247 aa, Artificial Sequence
  EGFR ScFv
DVVMTQTPLSLPVSLGDQASISCRSSQSLVHSNGNTYLHWYLQKPGQSPKLLIYKVSNRFSGVPDRFSGSGSGTDFTLKISRVEAEDLGVYFCSQSTHVPWTFGGGTKLEIKGGGGSGGGGSGGGGSGGQIQLVQSGPELKKPGETVKISCKASGYTFTEYPIHWVKQAPGKGFKWMGMIYTDIGKPTYAEEFKGRFAFSLETSASTAYLQINNLKNEDTATYFCVRDRYDSLFDYWGQGTTLTVSS

SEQ ID NO: 109 - DNA, 741 bp, Artificial Sequence
  EGFR ScFv
gatgttgtgatgacccaaactccactctccctgcctgtcagtcttggagatcaagcctccatctcttgcagatctagtcagagccttgtacacagtaatggaaacacctatttacattggtacctgcagaagccaggccagtctccaaagctcctgatctacaaagtttccaaccgattttctggggtcccagacaggttcagtggcagtggatcagggacagatttcacactcaagatcagcagagtggaggctgaggatctgggagtttatttctgctctcaaagtacacatgttccgtggacgttcggtggaggcaccaagctggaaatcaaaggcggaggtggaagcggagggggaggatctggcggcggaggaagcggaggccagatccagttggtgcagtctggacctgagctgaagaagcctggagagacagtcaagatctcctgcaaggcctctgggtataccttcacagaatatccaatacactgggtgaagcaggctccaggaaagggtttcaagtggatgggcatgatatacaccgacattggaaagccaacatatgctgaagagttcaagggacggtttgccttctctttggagacctctgccagcactgcctatttgcagatcaacaacctcaagaatgaggacacggctacatatttctgtgtaagagatcgatatgattccctctttgactactggggccaaggcaccactctcacagtctcctca

SEQ ID NO: 110 - protein, 249 aa, Artificial Sequence
  EGFR ScFv
EMQLVESGGGFVKPGGSLKLSCAASGFAFSHYDMSWVRQTPKQRLEWVAYIASGGDITYYADTVKGRFTISRDNAQNTLYLQMSSLKSEDTAMFYCSRSSYGNNGDALDFWGQGTSVTVSSGGGGSGGGGSGGGGSGGDVVMTQTPLSLPVSLGDQASISCRSSQSLVHSNGNTYLHWYLQKPGQSPKLLIYKVSNRFSGVPDRFSGSGSGTDFTLKISRVEAEDLGVYFCSQSTHVLTFGSGTKLEIK

SEQ ID NO: 111 - DNA, 747 bp, Artificial Sequence
  EGFR ScFv
gaaatgcagctggtggagtctgggggaggcttcgtgaagcctggagggtccctgaaactctcatgtgcagcctctggattcgctttcagtcactatgacatgtcttgggttcgccagactccgaagcagaggctggagtgggtcgcatacattgctagtggtggtgatatcacctactatgcagacactgtgaagggccgattcaccatctccagagacaatgcccagaacaccctgtacctgcaaatgagcagtctgaagtctgaggacacagccatgttttactgttcacgatcctcctatggtaacaacggagatgccctggacttctggggtcaaggtacctcagtcaccgtctcctcaggcggaggtggaagcggagggggaggatctggcggcggaggaagcggaggcgatgttgtgatgacccaaactccactctccctgcctgtcagtcttggagatcaagcctccatctcttgcagatctagtcagagccttgttcacagtaatggaaacacctatttacattggtacctgcagaagccaggccagtctccaaagctcctgatctacaaagtttccaaccgattttctggggtcccagacaggttcagtggcagtggatcagggacagatttcacactcaagatcagcagagtggaggctgaggatctgggagtttatttctgctctcaaagtacacatgttctcacgttcggctcggggacaaagttggaaataaaa

SEQ ID NO: 112 - protein, 249 aa, Artificial Sequence
  EGFR ScFv
DVVMTQTPLSLPVSLGDQASISCRSSQSLVHSNGNTYLHWYLQKPGQSPKLLIYKVSNRFSGVPDRFSGSGSGTDFTLKISRVEAEDLGVYFCSQSTHVLTFGSGTKLEIKGGGGSGGGGSGGGGSGGEMQLVESGGGFVKPGGSLKLSCAASGFAFSHYDMSWVRQTPKQRLEWVAYIASGGDITYYADTVKGRFTISRDNAQNTLYLQMSSLKSEDTAMFYCSRSSYGNNGDALDFWGQGTSVTVSS

SEQ ID NO: 113 - DNA, 747 bp, Artificial Sequence
  EGFR ScFv
gatgttgtgatgacccaaactccactctccctgcctgtcagtcttggagatcaagcctccatctcttgcagatctagtcagagccttgttcacagtaatggaaacacctatttacattggtacctgcagaagccaggccagtctccaaagctcctgatctacaaagtttccaaccgattttctggggtcccagacaggttcagtggcagtggatcagggacagatttcacactcaagatcagcagagtggaggctgaggatctgggagtttatttctgctctcaaagtacacatgttctcacgttcggctcggggacaaagttggaaataaaaggcggaggtggaagcggagggggaggatctggcggcggaggaagcggaggcgaaatgcagctggtggagtctgggggaggcttcgtgaagcctggagggtccctgaaactctcatgtgcagcctctggattcgctttcagtcactatgacatgtcttgggttcgccagactccgaagcagaggctggagtgggtcgcatacattgctagtggtggtgatatcacctactatgcagacactgtgaagggccgattcaccatctccagagacaatgcccagaacaccctgtacctgcaaatgagcagtctgaagtctgaggacacagccatgttttactgttcacgatcctcctatggtaacaacggagatgccctggacttctggggtcaaggtacctcagtcaccgtctcctca

SEQ ID NO: 114 - protein, 243 aa, Artificial Sequence
  EGFR ScFv
QVQLKQSGPGLVQPSQSLSITCTVSGFSLTNYGVHWVRQSPGKGLEWLGVIWSGGNTDYNTPFTSRLSINKDNSKSQVFFKMNSLQSNDTAIYYCARALTYYDYEFAYWGQGTLVTVSAGGGGSGGGGSGGGGSGGDILLTQSPVILSVSPGERVSFSCRASQSIGTNIHWYQQRTNGSPRLLIKYASESISGIPSRFSGSGSGTDFTLSINSVESEDIADYYCQQNNNWPTTFGAGTKLELK

SEQ ID NO: 115 - DNA, 729 bp, Artificial Sequence
  EGFR ScFv
caggtgcagctgaagcagtccggccccggcctggtgcagccctcccagtccctgtccatcacctgcaccgtgtccggcttctccctgaccaactacggcgtgcactgggtgcggcagtcccccggcaagggcctggagtggctgggcgtgatctggtccggcggcaacaccgactacaacacccccttcacctcccggctgtccatcaacaaggacaactccaagtcccaggtgttcttcaagatgaactccctgcagtccaacgacaccgccatctactactgcgcccgggccctgacctactacgactacgagttcgcctactggggccagggcaccctggtgaccgtgtccgccggcggaggtggaagcggagggggaggatctggcggcggaggaagcggaggcgacatcctgctgacccagtcccccgtgatcctgtccgtgtcccccggcgagcgggtgtccttctcctgccgggcctcccagtccatcggcaccaacatccactggtaccagcagcggaccaacggctccccccggctgctgatcaagtacgcctccgagtccatctccggcatcccctcccggttctccggctccggctccggcaccgacttcaccctgtccatcaactccgtggagtccgaggacatcgccgactactactgccagcagaacaacaactggcccaccaccttcggcgccggcaccaagctggagctgaag

SEQ ID NO: 116 - protein, 244 aa, Artificial Sequence
  EGFR ScFv
QVQLVQSGAEVKKPGASVKVSCKASGYTFTSHWMHWVRQAPGQGLEWIGEFNPSNGRTNYNEKFKSKATMTVDTSTNTAYMELSSLRSEDTAVYYCASRDYDYDGRYFDYWGQGTLVTVSSGGGGSGGGGSGGGGSGGDIQMTQSPSSLSASVGDRVTITCSASSSVTYMYWYQQKPGKAPKLLIYDTSNLASGVPSRFSGSGSGTDYTFTISSLQPEDIATYYCQQWSSHIFTFGQGTKVEIK

SEQ ID NO: 117 - DNA, 731 bp, Artificial Sequence
  EGFR ScFv
aggtgcagctggtgcagtccggcgccgaggtgaagaagcccggcgcctccgtgaaggtgtcctgcaaggcctccggctacaccttcacctcccactggatgcactgggtgcggcaggcccccggccagggcctggagtggatcggcgagttcaacccctccaacggccggaccaactacaacgagaagttcaagtccaaggccaccatgaccgtggacacctccaccaacaccgcctacatggagctgtcctccctgcggtccgaggacaccgccgtgtactactgcgcctcccgggactacgactacgacggccggtacttcgactactggggccagggcaccctggtgaccgtgtcctccggcggaggtggaagcggagggggaggatctggcggcggaggaagcggaggcgacatccagatgacccagtccccctcctccctgtccgcctccgtgggcgaccgggtgaccatcacctgctccgcctcctcctccgtgacctacatgtactggtaccagcagaagcccggcaaggcccccaagctgctgatctacgacacctccaacctggcctccggcgtgccctcccggttctccggctccggctccggcaccgactacaccttcaccatctcctccctgcagcccgaggacatcgccacctactactgccagcagtggtcctcccacatcttcaccttcggccagggcaccaaggtggagatcaag

SEQ ID NO: 118 - protein, 243 aa, Artificial Sequence
  EGFR ScFv
QVQLQESGPGLVKPSETLSLTCTVSGGSVSSGDYYWTWIRQSPGKGLEWIGHIYYSGNTNYNPSLKSRLTISIDTSKTQFSLKLSSVTAADTAIYYCVRDRVTGAFDIWGQGTMVTVSSGGGGSGGGGSGGGGSGGDIQMTQSPSSLSASVGDRVTITCQASQDISNYLNWYQQKPGKAPKLLIYDASNLETGVPSRFSGSGSGTDFTFTISSLQPEDIATYFCQHFDHLPLAFGGGTKVEIK

SEQ ID NO: 119 - DNA, 729 bp, Artificial Sequence
  EGFR ScFv
caggtgcagctgcaggagtccggccccggcctggtgaagccctccgagaccctgtccctgacctgcaccgtgtccggcggctccgtgtcctccggcgactactactggacctggatccggcagtcccccggcaagggcctggagtggatcggccacatctactactccggcaacaccaactacaacccctccctgaagtcccggctgaccatctccatcgacacctccaagacccagttctccctgaagctgtcctccgtgaccgccgccgacaccgccatctactactgcgtgcgggaccgggtgaccggcgccttcgacatctggggccagggcaccatggtgaccgtgtcctccggcggaggtggaagcggagggggaggatctggcggcggaggaagcggaggcgacatccagatgacccagtccccctcctccctgtccgcctccgtgggcgaccgggtgaccatcacctgccaggcctcccaggacatctccaactacctgaactggtaccagcagaagcccggcaaggcccccaagctgctgatctacgacgcctccaacctggagaccggcgtgccctcccggttctccggctccggctccggcaccgacttcaccttcaccatctcctccctgcagcccgaggacatcgccacctacttctgccagcacttcgaccacctgcccctggccttcggcggcggcaccaaggtggagatcaag

SEQ ID NO: 120 - protein, 125 aa, Artificial Sequence [sequence omitted]

SEQ ID NO: 121 - protein, 107 aa, Artificial Sequence [sequence omitted]

SEQ ID NO: 122 - protein, 118 aa, Artificial Sequence
  EGFR VH
QIQLVQSGPELKKPGETVKISCKASGYTFTEYPIHWVKQAPGKGFKWMGMIYTDIGKPTYAEEFKGRFAFSLETSASTAYLQINNLKNEDTATYFCVRDRYDSLFDYWGQGTTLTVSS

SEQ ID NO: 123 - protein, 112 aa, Artificial Sequence
  EGFR VL
DVVMTQTPLSLPVSLGDQASISCRSSQSLVHSNGNTYLHWYLQKPGQSPKLLIYKVSNRFSGVPDRFSGSGSGTDFTLKISRVEAEDLGVYFCSQSTHVPWTFGGGTKLEIK

SEQ ID NO: 124 - protein, 121 aa, Artificial Sequence
  EGFR VH
EMQLVESGGGFVKPGGSLKLSCAASGFAFSHYDMSWVRQTPKQRLEWVAYIASGGDITYYADTVKGRFTISRDNAQNTLYLQMSSLKSEDTAMFYCSRSSYGNNGDALDFWGQGTSVTVSS

SEQ ID NO: 125 - protein, 111 aa, Artificial Sequence
  EGFR VL
DVVMTQTPLSLPVSLGDQASISCRSSQSLVHSNGNTYLHWYLQKPGQSPKLLIYKVSNRFSGVPDRFSGSGSGTDFTLKISRVEAEDLGVYFCSQSTHVLTFGSGTKLEIK

SEQ ID NO: 126 - protein, 119 aa, Artificial Sequence
  EGR VH
QVQLKQSGPGLVQPSQSLSITCTVSGFSLTNYGVHWVRQSPGKGLEWLGVIWSGGNTDYNTPFTSRLSINKDNSKSQVFFKMNSLQSNDTAIYYCARALTYYDYEFAYWGQGTLVTVSA

SEQ ID NO: 127 - protein, 107 aa, Artificial Sequence
  EGFR VL
DILLTQSPVILSVSPGERVSFSCRASQSIGTNIHWYQQRTNGSPRLLIKYASESISGIPSRFSGSGSGTDFTLSINSVESEDIADYYCQQNNNWPTTFGAGTKLELK

SEQ ID NO: 128 - protein, 121 aa, Artificial Sequence [sequence omitted]

SEQ ID NO: 129 - protein, 106 aa, Artificial Sequence [sequence omitted]

SEQ ID NO: 130 - protein, 119 aa, Artificial Sequence [sequence omitted]

SEQ ID NO: 131 - protein, 107 aa, Artificial Sequence [sequence omitted]

SEQ ID NO: 132 - protein, 5 aa, Artificial Sequence
  EGFR CDR-H1
TYGMH

SEQ ID NO: 133 - protein, 5 aa, Artificial Sequence
  EGFR CDR-H1
EYPIH

SEQ ID NO: 134 - protein, 5 aa, Artificial SEquence
  EGFR CDR-H1
HYDMS

SEQ ID NO: 135 - protein, 5 aa, Artificial Sequence
  EGFR CDR-H1
NYGVH

SEQ ID NO: 136 - protein, 5 aa, Artificial Sequence
  EGFR CDR-H1
SHWMH

SEQ ID NO: 137 - protein, 7 aa, Artificial Sequence
  EGFR CDR-H1
SGDYYWT

SEQ ID NO: 138 - protein, 17 aa, Artificial Sequence
  EGFR CDR-H2
VIWDDGSYKYYGDSVKG

SEQ ID NO: 139 - protein, 17 aa, Artificial Sequence
  EGFR CDR-H2
MIYTDIGKPTYAEEFKG

SEQ ID NO: 140 - protein, 17 aa, Artificial Sequence
  EGFR CDR-H2
YIASGGDITYYADTVKG

SEQ ID NO: 141 - protein, 16 aa, Artificial Sequence
  EGFR CDR-H2
VIWSGGNTDYNTPFTS

SEQ ID NO: 142 - protein, 17 aa, Artificial Sequence
  EGFR CDR-H2
EFNPSNGRTNYNEKFKS

SEQ ID NO: 143 - protein, 16 aa, Artificial Sequence
  EGFR CDR-H2
HIYYSGNTNYNPSLKS

SEQ ID NO: 144 - protein, 16 aa, Artificial Sequnece
  EGFR CDR-H3
DGITMVRGVMKDYFDY

SEQ ID NO: 145 - protein, 9 aa, Artificial Sequence
  EGFR CDR-H3
DRYDSLFDY

SEQ ID NO: 146 - protein, 12 aa, Artificial Sequence
  EGFR CDR-H3
SSYGNNGDALDF

SEQ ID NO: 147 - protein, 11 aa, Artificial Sequence
  EGFR CDR-H3
ALTYYDYEFAY

SEQ ID NO: 148 - protein, 12 aa, Artificial Sequence
  EGFR CDR-H3
RDYDYDGRYFDY

SEQ ID NO: 149 - protein, 9 aa, Artificial Sequence
  EGFR CDR-H3
DRVTGAFDI

SEQ ID NO: 150 - protein, 11 aa, Artificial Sequence
  EGFR CDR-L1
RASQDISSALV

SEQ ID NO: 151 - protein, 16 aa, Artificial Sequence
  EGFR CDR-L1
RSSQSLVHSNGNTYLH

SEQ ID NO: 152 - protein, 16 aa, Artificial Sequence
  EGFRR CDR-L1
RSSQSLVHSNGNTYLH

SEQ ID NO: 153 - protein, 11 aa, Artificial Sequence
  EGFR CDR-L1
RASQSIGTNIH

SEQ ID NO: 154 - protein, 10 aa, Artificial Sequence
  EGFR CDR-L1
SASSSVTYMY

SEQ ID NO: 155 - protein, 11 aa, Artificial Sequence
  EGFR CDR-L1
QASQDISNYLN

SEQ ID NO: 156 - protein, 7 aa, Artificial Sequence
  EGFR CDR-L2
DASSLES

SEQ ID NO: 157 - protein, 7 aa, Artificial Sequence
  EGFR CDR-L2
KVSNRFS

SEQ ID NO: 158 - protein, 7 aa, Artificial Sequence
  EGFR CDR-L2
YASESIS

SEQ ID NO: 159 - protein, 7 aa, Artificial Sequence
  EGFR CDR-L2
DTSNLAS

SEQ ID NO: 160 - protein, 7 aa, Artificial Sequence
  EGFR CDR-L2
DASNLET

SEQ ID NO: 161 - protein, 9 aa, Artificial Sequence
  EGFR CDR-L3
QQFNSYPLT

SEQ ID NO: 162 - protein, 9 aa, Artificial Sequence
  EGFR CDR-L3
SQSTHVPWT

SEQ ID NO: 163 - protein, 8 aa, Artificial Sequence
  EGFR CDR-L3
SQSTHVLT

SEQ ID NO: 164 - protein, 9 aa, Artificial Sequence
  EGFR CDR-L3
QQNNNWPTT

SEQ ID NO: 165 - protein, 9 aa, Artificial Sequence
  EGFR CDR-L3
QQWSSHIFT

SEQ ID NO: 166 - protein, 9 aa, Artificial Sequence
  EGFR CDR-L3
QHFDHLPLA

SEQ ID NO: 167 - protein, 246 aa, Artificial Sequence
  pan-HLA ScFv
QVQLKQSGPGLVQPSQSLSLTCTVSGFSLTSYGVHWVRQPPGKGLEWLGVIWSGGSTDYNAAFISRLSIRKDNSKSQVFFKMNSLQADDTAIYYCARTFTTSTSAWFAYWGQGTLVTVSAGGGGSGGGGSGGGGSGGSIVMTQTPKFLLVSAGDRVTITCKASQSVSNDVAWYQQKPGQSPICLLIYYASNRYTGVPDRFTGSGYGTDFTFTISTVQAEDLAVYFCQQDYSSPPWTFGGGTKLEIR

SEQ ID NO: 168 - DNA, 738 bp, Artificial Sequence
  pan-HLA ScFv
caggtgcagctgaagcagtcaggacctggcctagtgcagccctcacagagcctgtccctgacctgcacagtctctggtttctcattaactagttatggcgtacactgggttcgccagcctccaggaaagggtctggagtggctgggagtgatctggagtggtggaagcacagactataatgctgctttcatatccagactgagcatcaggaaggacaactccaagagccaagtcttctttaaaatgaacagtctgcaagctgatgacacagccatatactactgtgccagaacctttactacgtctacctcggcctggtttgcttactggggccaagggactctggtcactgtctctgcaggcggaggtggaagcggagggggaggatctggcggcggaggaagcggaggcagcatcgtgatgacccagactccaaaattcctgcttgtgtctgcgggagacagagtcaccatcacttgcaaggcgagtcagtctgtgagcaacgacgtagcttggtatcagcagaaaccagggcaatctcctatctgtctcctgatctactatgcatctaatcggtatacaggggtccctgataggttcaccggaagtggatatgggacagatttcactttcaccatcagcaccgtgcaggctgaagatcttgcagtatatttctgtcaacaggattatagtagtcctccgtggactttcggcggagggaccaagttggagatcaga

SEQ ID NO: 169 - protein, 245 aa, Artificial Sequence
  pan-HLA ScFv
QVQLQESGPGLVKPSQTLSLTCTVSGFSLTSYGVHWIRQPPGKGLEWIGVIWSGGSTDYNAAFISRVTISVDTSKNQFSLKLSSVTAADTAVYYCARTFTTSTSAWFAYWGQGTLVTVSSGGGGSGGGGSGGGGSGGDIVMTQSPDSLAVSLGERATINCKASQSVSNDVAWYQQKPGQPPKLLIYYASNRYTGVPDRFSGSGSGTDFTLTISSLQAEDVAVYYCQQDYSSPPWTFGGGTKVEIK

SEQ ID NO: 170 - DNA, 735 bp, Artificial Sequence
  pan-HLA ScFv
caggtgcagctgcaggagtccggacctggcctagtgaagccctcacagaccctgtccctgacctgcacagtctctggtttctcattaactagctatggtgtacactggattagacagcctccaggaaagggtctggagtggattggagtgatctggagtggtggaagcacagactataatgctgctttcatatccagagtgaccatcagcgtggacacctccaagaaccaattctcccttaaactgagcagtgtgacagctgccgacacagccgtatactactgtgccagaacctttactacgtctacctcggcctggtttgcttactggggccaagggactctggtcactgtctcttcaggcggaggtggaagcggagggggaggatctggcggcggaggaagcggaggcgacatcgtgatgacccagagtccagattccctggctgtgtctctgggagagagagccaccatcaattgcaaggcgagtcagtctgtgagcaacgacgtagcttggtatcagcagaaaccagggcaacctcctaaactcctgatctactatgcatctaatcggtatacaggggtccctgataggttcagcggaagtggatctgggacagatttcactctcaccatcagcagcctgcaggctgaagatgttgcagtatattactgtcaacaggattatagtagtcctccgtggactttcggcggagggaccaaggtggagatcaaa

SEQ ID NO: 171 - protein, 245 aa, Artificial Sequence
  pan-HLA ScFv
EVQLLESGGGLVQPGGSLRLSCAASGFSLTSYGVHWVRQAPGKGLEWVSVIWSGGSTDYNAAFISRFTISRDNSKNTLYLQMNSLRAEDTAVYYCARTFTTSTSAWFAYWGQGTLVTVSSGGGGSGGGGSGGGGSGGDIQMTQSPSSLSASVGDRVTITCKASQSVSNDVAWYQQKPGKAPKLLIYYASNRYTGVPSRFSGSGSGTDFTFTISSLQPEDIATYYCQQDYSSPPWTFGGGTKVEIK

SEQ ID NO: 172 - DNA, 735 bp, Artificial Sequence
  pan-HLA ScFv
gaggtgcagctgctggagtccggaggtggcctagtgcagcccggagggagcctgcgcctgagctgcgcagcctctggtttctcattaactagctatggtgtacactgggttagacaggctccaggaaagggtctggagtgggttagcgtgatctggagtggtggaagcacagactataatgctgctttcatatccagatttaccatcagccgggacaactccaagaacacactctaccttcaaatgaacagtttgagagctgaagacacagccgtatactactgtgccagaacctttactacgtctacctcggcctggtttgcttactggggccaagggactctggtcactgtctcttcaggcggaggtggaagcggagggggaggatctggcggcggaggaagcggaggcgacatccagatgacccagagtccaagctccctgtctgcgtctgtgggagacagagtcaccatcacttgcaaggcgagtcagtctgtgagcaacgacgtagcttggtatcagcagaaaccagggaaagctcctaaactcctgatctactatgcatctaatcggtatacaggggtccctagtaggttcagcggaagtggatctgggacagatttcactttcaccatcagcagcctgcagcctgaagatattgcaacatattactgtcaacaggattatagtagtcctccgtggactttcggcggagggaccaaggtggagatcaaa

SEQ ID NO: 173 - protein, 245 aa, Artificial Sequence
  pan-HLA ScFv
QVQLQESGPGLVKPSETLSLTCTVSGFSLTSYGVHWIRQPPGKGLEWIGVIWSGGSTDYNAAFISRVTISRDTSKNQFSLKLSSVTAADTAVYYCARTFTTSTSAWFAYWGQGTLVTVSSGGGGSGGGGSGGGGSGGDIVMTQTPLSLSVTPGQPASISCKASQSVSNDVAWYLQKPGQSPQLLIYYASNRYTGVPDRFSGSGSGTDFTLKISRVEAEDVGVYYCQQDYSSPPWTFGGGTKVEIK

SEQ ID NO: 174 - DNA, 735 bp, Artificial Sequence
  pan-HLA ScFv
caggtgcagctgcaggagtccggacctggcctagtgaagccctcagaaaccctgtccctgacctgcacagtctctggtttctcattaactagctatggtgtacactggattagacagcctccaggaaagggtctggagtggattggagtgatctggagtggtggaagcacagactataatgctgctttcatatccagagtgaccatcagcagggacacctccaagaaccaattctcccttaaactgagcagtgtgacagctgccgacacagccgtatactactgtgccagaacctttactacgtctacctcggcctggtttgcttactggggccaagggactctggtcactgtctcttcaggcggaggtggaagcggagggggaggatctggcggcggaggaagcggaggcgacatcgtgatgacccagactccactttccctgtctgtgactccgggacagccagccagcatcagttgcaaggcgagtcagtctgtgagcaacgacgtagcttggtatctgcagaaaccagggcaatctcctcaactcctgatctactatgcatctaatcggtatacaggggtccctgataggttcagcggaagtggatctgggacagatttcactttgaagatcagcagggtggaggctgaagatgttggagtatattactgtcaacaggattatagtagtcctccgtggactttcggcggagggaccaaggtggagatcaaa

SEQ ID NO: 175 - protein, 245 aa, Artificial Sequence
  pan-HLA ScFv
QVQLVESGGGVVQPGRSLRLSCAVSGFSLTSYGMHWVRQAPGKGLEWVAVIWSGGSTDYNAAFISRFTISRDNSKNTLYLQMNSLRAEDTAVYYCAKTFTTSTSAWFAYWGQGTLVTVSSGGGGSGGGGSGGGGSGGEIVLTQSPATLSLSPGERATLSCRASQSVSNDLAWYQQKPGQAPRLLIYYASNRYTGVPDRFSGSGSGTDFTLTISSLEPEDFAVYYCQQDYSSPPWTFGQGTKVEIK

SEQ ID NO: 176 - DNA, 735 bp, Artificial Sequence
  pan-HLA ScFv
caggtgcagctggtggagtccggaggtggcgtagtgcagcccggaaggagcctgcgcctgagctgcgcagtctctggtttctcattaactagctatggtatgcactgggttagacaggctccaggaaagggtctggagtgggttgcagtgatctggagtggtggaagcacagactataatgctgctttcatatccagatttaccatcagccgggacaactccaagaacacactctaccttcaaatgaacagtttgagagctgaagacacagccgtatactactgtgccaaaacctttactacgtctacctcggcctggtttgcttactggggccaagggactctggtcactgtctcttcaggcggaggtggaagcggagggggaggatctggcggcggaggaagcggaggcgagatcgtgctgacccagagtccagctaccctgtctctgtctccgggagagagagccaccctcagttgcagggcgagtcagtctgtgagcaacgacctagcttggtatcagcagaaaccagggcaagctcctagactcctgatctactatgcatctaatcggtatacaggggtccctgataggttcagcggaagtggatctgggacagatttcactctcaccatcagcagcctggagcctgaagattttgcagtatattactgtcaacaggattatagtagtcctccgtggactttcggccaagggaccaaggtggagatcaaa

SEQ ID NO: 177 - protein, 245 aa, Artificial Sequence
  pan-HLA ScFv
QVQLVESGGGVVQPGRSLRLSCAVSGFSLTSYGMHWVRQAPGKGLEWVAVIWSGGSTDYNAAFISRFTISRDNSKNTLYLQMNSLRAEDTAVYYCARTFTTSTSAWFAYWGQGTLVTVSSGGGGSGGGGSGGGGSGGDIQMTQSPSSLSASVGDRVTITCQASQSVSNDLNWYQQKPGKAPKLLIYYASNRYTGVPDRFSGSGSGTDFTFTISSLQPEDIATYYCQQDYSSPPWTFGGGTKVEIK

SEQ ID NO: 178 - DNA, 735 bp, Artificial Sequence
  pan-HLA ScFv
caggtgcagctggtggagtccggaggtggcgtagtgcagcccggaaggagcctgcgcctgagctgcgcagtctctggtttctcattaactagctatggtatgcactgggttagacaggctccaggaaagggtctggagtgggttgcagtgatctggagtggtggaagcacagactataatgctgctttcatatccagatttaccatcagccgggacaactccaagaacacactctaccttcaaatgaacagtttgagagctgaagacacagccgtatactactgtgccagaacctttactacgtctacctcggcctggtttgcttactggggccaagggactctggtcactgtctcttcaggcggaggtggaagcggagggggaggatctggcggcggaggaagcggaggcgacatccagatgacccagagtccaagctccctgtctgcgtctgtgggagacagagtcaccatcacttgccaggcgagtcagtctgtgagcaacgacctaaattggtatcagcagaaaccagggaaagctcctaaactcctgatctactatgcatctaatcggtatacaggggtccctgataggttcagcggaagtggatctgggacagatttcactttcaccatcagcagcctgcagcctgaagatattgcaacatattactgtcaacaggattatagtagtcctccgtggactttcggcggagggaccaaggtggagatcaaa

SEQ ID NO: 179 - DNA, 741 bp, Artificial Sequence
  HLA-A*02 antigen binding domain
gatgttttgatgacccaaactccactctccctgcctgtcagtcttggagatcaagcctccatctcttgcagatctagtcagagcattgtacatagtaatggaaacacctatttagaatggtacctgcagaaaccaggccagtctccaaagctcctgatctacaaagtttccaaccgattttctggggtcccagacaggttcagtggcagtggatcagggacagatttcacactcaagatcagtagagtggaggctgaggatctgggagtttattactgctttcaaggttcacatgttcctcggacgtccggtggaggcaccaagctggaaatcaaaggcggaggtggaagcggagggggaggatctggcggcggaggaagcggaggccaggtccagctgcagcagtctggacctgagctggtgaagcctggggcttcagtgaggatatcctgcaaggcttctggctacaccttcacaagttaccatatacattgggtgaagcagaggcctggacagggacttgagtggattggatggatttatcctggaaatgttaatactgagtacaatgagaagttcaagggcaaggccacactgactgcagacaaatcgtccagcacagcctacatgcacctcagcagcctgacctctgaggactctgcggtctatttctgtgccagagaggagattacctatgctatggactactggggtcaaggaacctcagtcaccgtgtcctca

SEQ ID NO: 180 - DNA, 741 bp, Artificial Sequence
  HLA-A*02 antigen binding domain
caggtgcagctggtgcagtctggggctgaggtgaagaagcctgggtcctcagtgaaggtttcctgcaaggcttctggatacaccttcactagctatcatatacattgggtgcgccaggcccccggacaagggcttgagtggatgggatggatctaccctggcaatgttaacacagaatataatgagaagttcaagggcaaagccaccattaccgcggacaaatccacgagcacagcctacatggagctgagcagcctgagatctgaagacacggctgtgtattactgtgcgagggaggaaattacctacgctatggactactggggccagggaaccacagtcaccgtgtcctcaggcggaggtggaagcggagggggaggatctggcggcggaggaagcggaggcgagattgtattgacccagagcccaggcaccctgagcctctctccaggagagcgggccaccctcagttgtagatccagtcagagtattgtacacagtaatgggaacacctatttggaatggtatcagcagaaaccaggtcaagccccaagattgctcatctacaaagtctctaacagatttagtggtattccagacaggttcagcggttccggaagtggtactgatttcaccctcacgatctccaggctcgagccagaagatttcgccgtttattactgttttcaaggttcacatgtgccgcgcacattcggtgggggtactaaagtagaaatcaaa

SEQ ID NO: 181 - DNA, 741 bp, Artificial Sequence
  HLA-A*02 antigen binding domain
caggtgcagctggtgcagtctggggctgaggtgaagaagcctgggtcctcagtgaaggtttcctgcaaggcttctggatacaccttcactagctatcatatacattgggtgcgccaggcccccggacaagggcttgagtggatgggatggatctaccctggcaatgttaacacagaatataatgagaagttcaagggcaaagccaccattaccgcggacaaatccacgagcacagcctacatggagctgagcagcctgagatctgaagacacggctgtgtattactgtgcgagggaggaaattacctacgctatggactactggggccagggaaccacagtcaccgtgtcctcaggcggaggtggaagcggagggggaggatctggcggcggaggaagcggaggcgacattgtaatgacccagaccccactcagcctgcccgtcactccaggagagccggccagcatcagttgtagatccagtcagagtattgtacacagtaatgggaacacctatttggaatggtatctgcagaaaccaggtcaatccccacaattgctcatctacaaagtctctaacagatttagtggtgtaccagacaggttcagcggttccggaagtggtactgatttcaccctcaagatctccagggtcgaggcagaagatgtcggcgtttattactgttttcaaggttcacatgtgccgcgcacattcggtgggggtactaaagtagaaatcaaa

SEQ ID NO: 182 - DNA, 741 bp, Artificial Sequence
  HLA-A*02 antigen binding domain
gaggtgcagctggtggagtctgggggtgggctggtgaagcctgggggctcactgaggctttcctgcgcggcttctggatacaccttcactagctatcatatacattgggtgcgccaggcccccggaaaagggcttgagtgggtgggatggatctaccctggcaatgttaacacagaatataatgagaagttcaagggcagattcaccattagcagggacgattccaagaacacactctacctgcagatgaacagcctgaaaactgaagacacggctgtgtattactgtgcgagggaggaaattacctacgctatggactactggggccagggaaccacagtcaccgtgtcctcaggcggaggtggaagcggagggggaggatctggcggcggaggaagcggaggcgacattcaaatgacccagagcccatccagcctgagcgcatctgtaggtgaccgggtcaccatcacttgtagatccagtcagagtattgtacacagtaatgggaacacctatttggaatggtatcagcagaaaccaggtaaagccccaaaattgctcatctacaaagtctctaacagatttagtggtgtaccaagcaggttcagcggttccggaagtggtactgatttcaccctcacgatctcctctctccagccagaagatttcgccacttattactgttttcaaggttcacatgtgccgcgcacattcggtgggggtactaaagtagaaatcaaa

SEQ ID NO: 183 - DNA, 741 bp, Artificial Sequence
  HLA-A*02 antigen binding domain
caggtgcagctggtgcagtctggggctgaggtgaagaagcctgggtcctcagtgaaggtttcctgcaaggcttctggatacaccttcactagctatcatatacattgggtgcgccaggcccccggacaagggcttgagtggatcggatggatctaccctggcaatgttaacacagaatataatgagaagttcaagggcaaagccaccattaccgcggacgaatccacgaacacagcctacatggagctgagcagcctgagatctgaagacacggctgtgtattactgtgcgagggaggaaattacctacgctatggactactggggccagggaaccctggtcaccgtgtcctcaggcggaggtggaagcggagggggaggatctggcggcggaggaagcggaggcgacattcaaatgacccagagcccatccaccctgagcgcatctgtaggtgaccgggtcaccatcacttgtagatccagtcagagtattgtacacagtaatgggaacacctatttggaatggtatcagcagaaaccaggtaaagccccaaaattgctcatctacaaagtctctaacagatttagtggtgtaccagccaggttcagcggttccggaagtggtactgaattcaccctcacgatctcctctctccagccagatgatttcgccacttattactgttttcaaggttcacatgtgccgcgcacattcggtcagggtactaaagtagaagtcaaa

SEQ ID NO: 184 - DNA, 741 bp, Artificial Sequence
  HLA-A*02 antigen binding domain
caggtgcagctggtgcagtctggggctgaggtgaagaagcctgggtcctcagtgaaggtttcctgcaaggcttctggatacaccttcactagctatcatatgcattgggtgcgccaggcccccggacaagggcttgagtggatcggatacatctaccctggcaatgttaacacagaatataatgagaagttcaagggcaaagccacccttaccgcggacaaatccacgaacacagcctacatggagctgagcagcctgagatctgaagacacggctgtgtatttctgtgcgagggaggaaattacctacgctatggactactggggccagggaaccctggtcaccgtgtcctcaggcggaggtggaagcggagggggaggatctggcggcggaggaagcggaggcgacgttcaaatgacccagagcccatccaccctgagcgcatctgtaggtgaccgggtcaccatcacttgtagctccagtcagagtattgtacacagtaatgggaacacctatatggaatggtatcagcagaaaccaggtaaagccccaaaattgctcatctacaaagtctctaacagatttagtggtgtaccagacaggttcagcggttccggaagtggtactgaattcaccctcacgatctcctctctccagccagatgatttcgccacttattactgtcatcaaggttcacatgtgccgcgcacattcggtcagggtactaaagtagaagtcaaa

SEQ ID NO: 185 - DNA, 741 bp, Artificial Sequence
  HLA-A*02 antigen binding domain
caggtgcagctgcagcagtctgggcctgagctggtgaagcctggggcctcagtgaagatgtcctgcaaggcttctggatacaccttcactagctatcatatccagtgggtgaagcagaggcctggacaagggcttgagtggatcggatggatctaccctggcgatggtagtacacagtataatgagaagttcaagggcaaaaccacccttaccgcggacaaatcctccagcacagcctacatgttgctgagcagcctgacctctgaagactctgctatctatttctgtgcgagggaggggacctactacgctatggactactggggccagggaacctcagtcaccgtgtcctcaggcggaggtggaagcggagggggaggatctggcggcggaggaagcggaggcgatgttttgatgacccagactccactctccctgcctgtctctcttggagaccaagtctccatctcttgtagatccagtcagagtattgtacacagtaatgggaacacctatttagaatggtatctgcagaaaccaggtcagtctccaaagttgctcatctacaaagtctctaacagatttagtggtgtaccagacaggttcagcggttccggaagtggtactgatttcaccctcaagatctcgagagtggaggctgaggatctgggagtttattactgttttcaaggttcacatgtgccgcgcacattcggtggaggtactaaactggaaatcaaa

SEQ ID NO: 186 - DNA, 741 bp, Artificial Sequence
  HLA-A*02 antigen binding domain
cagctgcagctgcaggagtctgggcccgggctggtgaagccttcggaaacgctgagcctcacctgcacggtttctggatacaccttcaccagctatcatatccagtggatccgacagccccctggaaaagggcttgagtggatcggatggatctaccctggcgatggttcaacacagtacaatgagaagttcaagggcagagccacgattagcgtggacacatccaagaaccaattctccctgaacctggacagcgtgagtgctgcggacacggccatttattactgtgcgagagagggaacttactacgctatggactactggggcaaagggagcacggtcaccgtgtcctcaggcggaggtggaagcggagggggaggatctggcggcggaggaagcggaggcgacatccagatgacccagagcccaagctccctgagtgcgtccgtgggcgaccgcgtgaccatcacttgcagatcctctcagtccatcgtgcactccaacggcaacacgtacctcgagtggtaccagcagaagcccgggaaggccccgaaactgctcatctacaaggtgagcaaccggttctccggcgtccccagccgcttctcagggtccggctcggggacggatttcaccttcacgattagcagcttgcagcccgaagacatcgccacgtactactgctttcagggaagtcacgtgccgcgtaccttcgggccgggcacgaaagtggatattaag

SEQ ID NO: 187 - DNA, 741 bp, Artificial Sequence
  HLA-A*02 antigen binding domain
gaggtgcagctggtgcagtctggggccgagctgaagaagcctgggtcctcggtgaaggtgtcctgcaaggcttctggatacaccttcaccagctatcatatccagtgggtaaaacaggcccctggacaagggcttgagtggatcggatggatctaccctggcgatggttcaacacagtacaatgagaagttcaagggcaaagccacgcttaccgtggacaaatccacgaacacagcctacatggagctgagcagcctgagatctgaggacacggccgtatattactgtgcgagagagggaacttactacgctatggactactggggccaagggaccctggtcaccgtgtcctcaggcggaggtggaagcggagggggaggatctggcggcggaggaagcggaggcgacatccagatgacccagagcccatccaccctgagtgcgtccgtgggcgaccgcgtgaccatcacttgcagatcctctcagtccatcgtgcactccaacggcaacacgtacctcgagtggtaccagcagaagcccgggaaggccccgaaactgctcatctacaaggtgagcaaccggttctccggcgtccccagccgcttctcagggtccggctcggggacggatttcaccctcacgattagcagcttgcagcccgatgacttcgccacgtactactgctttcagggaagtcacgtgccgcgtaccttcgggcagggcacgaaagtggaagttaag

SEQ ID NO: 188 - DNA, 741 bp, Artificial Sequence
  HLA-A*02 antigen binding domain
caggtgcagctggtgcagtctggggccgaggtgaagaagcctgggtcctcggtgaaggtgtcctgcaaggcttctggatacaccttcaccagctatcatatccagtgggtacgacaggcccctggacaagggcttgagtggatgggatggatctaccctggcgatggttcaacacagtacaatgagaagttcaagggcagagtcacgattaccgcggacaaatccacgagcacagcctacatggagctgagcagcctgagatctgaggacacggccgtatattactgtgcgagagagggaacttactacgctatggactactggggccaagggaccacggtcaccgtgtcctcaggcggaggtggaagcggagggggaggatctggcggcggaggaagcggaggcgagatcgtcctgacccagagcccagggaccctgagtttgtccccgggcgagcgcgcgaccctcagttgcagatcctctcagtccatcgtgcactccaacggcaacacgtacctcgagtggtaccagcagaagcccgggcaggccccgcgactgctcatctacaaggtgagcaaccggttctccggcatccccgaccgcttctcagggtccggctcggggacggatttcaccctcacgattagccgcttggagcccgaagacttcgccgtgtactactgctttcagggaagtcacgtgccgcgtaccttcggggggggcacgaaagtggaaattaag

SEQ ID NO: 189 - DNA, 741 bp, Artificial Sequence
  HLA-A*02 antigen binding domain
caggtgaccctgaagcagtctggggccgaggtgaagaagcctgggtcctcggtgaaggtgtcctgcacggcttctggatacaccttcaccagctatcatgtcagctgggtacgacaggcccctggacaagggcttgagtggttgggaaggatctaccctggcgatggttcaacacagtacaatgagaagttcaagggcaaagtcacgattaccgcggacaaatccatggacacatccttcatggagctgaccagcctgacatctgaggacacggccgtatattactgtgcgagagagggaacttactacgctatggacctctggggccaagggaccctggtcaccgtgtcctcaggcggaggtggaagcggagggggaggatctggcggcggaggaagcggaggcgagatcgtcctgacccagagcccagggaccctgagtttgtccccgggcgagcgcgcgaccctcagttgcagatcctctcagtccatcgtgcactccaacggcaacacgtacctcgcgtggtaccagcagaagcccgggcaggccccgcgactgctcatctccaaggtgagcaaccggttctccggcgtccccgaccgcttctcagggtccggctcggggacggatttcaccctcacgattagccgcttggagcccgaagacttcgccgtgtactactgccaacagggaagtcacgtgccgcgtaccttcggggggggcacgaaagtggaaattaag

SEQ ID NO: 190 - DNA, 741 bp, Artificial Sequence
  HLA-A*02 antigen binding domain
caggtgcagctggtgcagtctggggccgaggtgaagaagcctggggcctcggtgaaggtgtcctgcaaggcttctggatacaccttcaccagctatcatatgcactgggtacgacaggcccctggacaaaggcttgagtggatgggatggatctaccctggcgatggttcaacacagtacaatgagaagttcaagggcaaagtcacgattacccgggacacatccgcgagcacagcctacatggagctgagcagcctgagatctgaggacacggccgtatattactgtgcgagagagggaacttactacgctatggactactggggccaagggaccctggtcaccgtgtcctcaggcggaggtggaagcggagggggaggatctggcggcggaggaagcggaggcgacatcgtcatgacccagaccccactgtccctgcctgtgaccccgggcgagcccgcgagcatcagttgcagatcctctcagtccatcgtgcactccaacggcaacacgtacctcgactggtacctgcagaagcccgggcagtccccgcaactgctcatctacaaggtgagcaaccggttctccggcgtccccgaccgcttctcagggtccggctcggggacggatttcaccctcaagattagccgcgtggaggccgaagacgtcggcgtgtactactgcatgcagggaagtcacgtgccgcgtaccttcggggggggcacgaaagtggaaattaag

SEQ ID NO: 191 - protein, 9 aa, Artificial Sequence
  HA-1 variant H peptide
VLHDDLLEA

SEQ ID NO: 192 - protein, 19 aa, Artificial Sequence
  P2A self cleaving peptide
ATNFSLLKQAGDVEENPGP

SEQ ID NO: 193 - protein, 608 aa, Artificial Sequence
  HA-1H TCR alpha and beta
MVKIRQFLLAILWLQLSCVSAAKNEVEQSPQNLTAQEGEFITINCSYSVGISALHWLQQHPGGGIVSLFMLSSGKKKHGRLIATINIQEKHSSLHITASHPRDSAVYICAVRSVSGAGSYQLTFGKGTKLSVIPNIQNPDPAVYQLRDSKSSDKSVCLFTDFDSQTNVSQSKDSDVYITDKCVLDMRSMDFKSNSAVAWSNKSDFACANAFNNSIIPEDTFFPSPESSCDVKLVEKSFETDTNLNFQNLSVIGFRILLLKVAGFNLLMTLRLWSSGSGATNFSLLKQAGDVEENPGPMGTSLLCWMALCLLGADHADTGVSQNPRHKITKRGQNVTFRCDPISEHNRLYWYRQTLGQGPEFLTYFQNEAQLEKSRLLSDRFSAERPKGSFSTLEIQRTEQGDSAMYLCASSIDSFNEQFFGPGTRLTVLEDLKNVFPPEVAVFEPSEAEISHTQKATLVCLATGFYPDHVELSWWVNGKEVHSGVCTDPQPLKEQPALNDSRYCLSSRLRVSATFWQNPRNHFRCQVQFYGLSENDEWTQDRAKPVTQIVSAEAWGRADCGFTSESYQQGVLSATILYEILLGKATLYAVLVSALVLMAMVKRKDSRG

SEQ ID NO: 194 - DNA, 1827 bp, Artificial Sequence
  HA-1(H) TCR alpha and beta
atggtgaagatccggcaatttttgttggctattttgtggcttcagctaagctgtgtaagtgccgccaaaaatgaagtggagcagagtcctcagaacctgactgcccaggaaggagaatttatcacaatcaactgcagttactcggtaggaataagtgccttacactggctgcaacagcatccaggaggaggcattgtttccttgtttatgctgagctcagggaagaagaagcatggaagattaattgccacaataaacatacaggaaaagcacagctccctgcacatcacagcctcccatcccagagactctgccgtctacatctgtgctgtcagaagcgtgtccggggccggctcctaccagctcacctttgggaaggggaccaaattatcagtcattccaaatatccagaaccctgaccctgccgtgtaccagctgagagactctaaatccagtgacaagtctgtctgcctattcaccgattttgattctcaaacaaatgtgtcacaaagtaaggattctgatgtgtatatcacagacaaatgtgtgctagacatgaggtctatggacttcaagagcaacagtgctgtggcctggagcaacaaatctgactttgcatgtgcaaacgccttcaacaacagcattattccagaagacaccttcttccccagcccagaaagttcctgtgatgtcaagctggtcgagaaaagctttgaaacagatacgaacctaaactttcaaaacctgtcagtgattgggttccgaatcctcctcctgaaagtggccgggtttaatctgctcatgacgctgcggctgtggtccagcggatccggagccaccaacttcagcctgctgaagcaggccggcgacgtggaggagaaccccggccccatgggcaccagcctcctctgctggatggccctgtgtctcctgggggcagatcacgcagatactggagtctcccagaaccccagacacaagatcacaaagaggggacagaatgtaactttcaggtgtgatccaatttctgaacacaaccgcctttattggtaccgacagaccctggggcagggcccagagtttctgacttacttccagaatgaagctcaactagaaaaatcaaggctgctcagtgatcggttctctgcagagaggcctaagggatctttctccaccttggagatccagcgcacagagcagggggactcggccatgtatctctgtgccagcagcatcgactccttcaacgagcagttcttcgggccgggcaccaggctcacggtcctcgaggacctgaaaaacgtgttcccacccgaggtcgctgtgtttgagccatcagaagcagagatctcccacacccaaaaggccacactggtgtgcctggccacaggcttctaccccgaccacgtggagctgagctggtgggtgaatgggaaggaggtgcacagtggggtctgcacagacccgcagcccctcaaggagcagcccgccctcaatgactccagatactgcctgagcagccgcctgagggtgtcggccaccttctggcagaacccccgcaaccacttccgctgtcaagtccagttctacgggctctcggagaatgacgagtggacccaggatagggccaaacctgtcacccagatcgtcagcgccgaggcctggggtagagcagactgtggcttcacctccgagtcttaccagcaaggggtcctgtctgccaccatcctctatgagatcttgctagggaaggccaccttgtatgccgtgctggtcagtgccctcgtgctgatggccatggtcaagagaaaggattccagaggctag

SEQ ID NO: 195 - protein, 440 aa, Artificial Sequence
  Ftcr alpha LIR1 HA-1H
MVKIRQFLLAILWLQLSCVSAAKNEVEQSPQNLTAQEGEFITINCSYSVGISALHWLQQHPGGGIVSLFMLSSGKKKHGRLIATINIQEKHSSLHITASHPRDSAVYICAVRSVSGAGSYQLTFGKGTKLSVIPNIQNPDPAVYQLRDSKSSDKSVCLFTDFDSQTNVSQSKDSDVYITDKCVLDMRSMDFKSNSAVAWSNKSDFACANAFNNSIIPEDTFFPSPESSCDVKLVEKSFETDTNLNFQNLSVVIGILVAVILLLLLLLLLFLILRHRRQGKHWTSTQRKADFQHPAGAVGPEPTDRGLQWRSSPAADAQEENLYAAVKHTQPEDGVEMDTRSPHDEDPQAVTYAEVKHSRPRREMASPPSPLSGEFLDTKDRQAEEDRQMDTEAAASEAPQDVTYAQLHSLTLRREATEPPPSQEGPSPAVPSIYATLAIH

SEQ ID NO: 196 - DNA, 1279 bp, Artificial Sequence
  Ftcr alpha LIR1 HA-1H
atggtgaagatccggcaatttttgttggctattttgtggcttcagctaagctgtgtaagtgccgccaaaaatgaagtggagcagagtcctcagaacctgactgcccaggaaggagaatttatcacaatcaactgcagttactcggtaggaataagtgccttacactggctgcaacagcatccaggaggaggcattgtttccttgtttatgctgagctcagggaagaagaagcatggaagattaattgccacaataaacatacaggaaaagcacagctccctgcacatcacagcctcccatcccagagactctgccgtctacatctgtgctgtcagaagcgtgtccggggccggctcctaccagctcacctttgggaaggggaccaaattatcagtcattccaaatatccagaaccctgaccctgccgtgtaccagctgagagactctaaatccagtgacaagtctgtctgcctattcaccgattttgattctcaaacaaatgtgtcacaaagtaaggattctgatgtgtatatcacagacaaatgtgtgctagacatgaggtctatggacttcaagagcaacagtgctgtggcctggagcaacaaatctgactttgcatgtgcaaacgccttcaacaacagcattattccagaagacaccttcttccccagcccagaaagttcctgtgatgtcaagctggtcgagaaaagctttgaaacagatacgaacctaaactttcaaaacctgtcagttgtgatcggcatcttggtggccgtcatcctactgctcctcctcctcctcctcctcttcctcatcctccgacatcgacgtcagggcaaacactggacatcgacccagagaaaggctgatttccaacatcctgcaggggctgtggggccagagcccacagacagaggcctgcagtggaggtccagcccagctgccgatgcccaggaagaaaacctctatgctgccgtgaagcacacacagcctgaggatggggtggagatggacactcggagcccacacgatgaagacccccaggcagtgacgtatgccgaggtgaaacactccagacctaggagagaaatggcctctcctccttccccactgtctggggaattcctggacacaaaggacagacaggcggaagaggacaggcagatggacactgaggctgctgcatctgaagccccccaggatgtgacctacgcccagctgcacagcttgaccctcagacgggaggcaactgagcctcctccatcccaggaagggccct

SEQ ID NO: 197 - protein, 466 aa, Artificial Sequence
  Ftcr beta LIR1 HA-1H
MGTSLLCWMALCLLGADHADTGVSQNPRHKITKRGQNVTFRCDPISEHNRLYWYRQTLGQGPEFLTYFQNEAQLEKSRLLSDRFSAERPKGSFSTLEIQRTEQGDSAMYLCASSIDSFNEQFFGPGTRLTVLEDLKNVFPPEVAVFEPSEAEISHTQKATLVCLATGFYPDHVELSWWVNGKEVHSGVCTDPQPLKEQPALNDSRYCLSSRLRVSATFWQNPRNHFRCQVQFYGLSENDEWTQDRAKPVTQIVSAEAWGRADCGFTSESYQQGVLSVVIGILVAVILLLLLLLLLFLILRHRRQGKHWTSTQRKADFQHPAGAVGPEPTDRGLQWRSSPAADAQEENLYAAVKHTQPEDGVEMDTRSPHDEDPQAVTYAEVKHSRPRREMASPPSPLSGEFLDTKDRQAEEDRQMDTEAAASEAPQDVTYAQLHSLTLRREATEPPPSQEGPSPAVPSIYATLAIH

SEQ ID NO: 198 - DNA, 1401 bp, Artificial Sequence
  Ftcr beta LIR1 HA-1H
atgggcaccagcctcctctgctggatggccctgtgtctcctgggggcagatcacgcagatactggagtctcccagaaccccagacacaagatcacaaagaggggacagaatgtaactttcaggtgtgatccaatttctgaacacaaccgcctttattggtaccgacagaccctggggcagggcccagagtttctgacttacttccagaatgaagctcaactagaaaaatcaaggctgctcagtgatcggttctctgcagagaggcctaagggatctttctccaccttggagatccagcgcacagagcagggggactcggccatgtatctctgtgccagcagcatcgactccttcaacgagcagttcttcgggccgggcaccaggctcacggtcctcgaggacctgaaaaacgtgttcccacccgaggtcgctgtgtttgagccatcagaagcagagatctcccacacccaaaaggccacactggtgtgcctggccacaggcttctaccccgaccacgtggagctgagctggtgggtgaatgggaaggaggtgcacagtggggtctgcacagacccgcagcccctcaaggagcagcccgccctcaatgactccagatactgcctgagcagccgcctgagggtgtcggccaccttctggcagaacccccgcaaccacttccgctgtcaagtccagttctacgggctctcggagaatgacgagtggacccaggatagggccaaacctgtcacccagatcgtcagcgccgaggcctggggtagagcagactgtggcttcacctccgagtcttaccagcaaggggtcctgtctgttgtgatcggcatcttggtggccgtcatcctactgctcctcctcctcctcctcctcttcctcatcctccgacatcgacgtcagggcaaacactggacatcgacccagagaaaggctgatttccaacatcctgcaggggctgtggggccagagcccacagacagaggcctgcagtggaggtccagcccagctgccgatgcccaggaagaaaacctctatgctgccgtgaagcacacacagcctgaggatggggtggagatggacactcggagcccacacgatgaagacccccaggcagtgacgtatgccgaggtgaaacactccagacctaggagagaaatggcctctcctccttccccactgtctggggaattcctggacacaaaggacagacaggcggaagaggacaggcagatggacactgaggctgctgcatctgaagccccccaggatgtgacctacgcccagctgcacagcttgaccctcagacgggaggcaactgagcctcctccatcccaggaagggccctctccagctgtgcccagcatctacgccactctggccatccactag

SEQ ID NO: 199 - protein, 250 aa, Artificial Sequence
  HA-1H TCR alpha
MVKIRQFLLAILWLQLSCVSAAKNEVEQSPQNLTAQEGEFITINCSYSVGISALHWLQQHPGGGIVSLFMLSSGKKKHGRLIATINIQEKHSSLHITASHPRDSAVYICAVRSVSGAGSYQLTFGKGTKLSVIPNIQNPDPAVYQLRDSKSSDKSVCLFTDFDSQTNVSQSKDSDVYITDKCVLDMRSMDFKSNSAVAWSNKSDFACANAFNNSIIPEDTFFPSPESSCDVKLVEKSFETDTNLNFQNLS

SEQ ID NO: 200 - protein, 276 aa, Artificial Sequence
  HA-1H TCR beta
MGTSLLCWMALCLLGADHADTGVSQNPRHKITKRGQNVTFRCDPISEHNRLYWYRQTLGQGPEFLTYFQNEAQLEKSRLLSDRFSAERPKGSFSTLEIQRTEQGDSAMYLCASSIDSFNEQFFGPGTRLTVLEDLKNVFPPEVAVFEPSEAEISHTQKATLVCLATGFYPDHVELSWWVNGKEVHSGVCTDPQPLKEQPALNDSRYCLSSRLRVSATFWQNPRNHFRCQVQFYGLSENDEWTQDRAKPVTQIVSAEAWGRADCGFTSESYQQGVLS

SEQ ID NO: 201 - DNA, 750 bp, Artificial Sequence
  HA-1H TCR alpha
atggtgaagatccggcaatttttgttggctattttgtggcttcagctaagctgtgtaagtgccgccaaaaatgaagtggagcagagtcctcagaacctgactgcccaggaaggagaatttatcacaatcaactgcagttactcggtaggaataagtgccttacactggctgcaacagcatccaggaggaggcattgtttccttgtttatgctgagctcagggaagaagaagcatggaagattaattgccacaataaacatacaggaaaagcacagctccctgcacatcacagcctcccatcccagagactctgccgtctacatctgtgctgtcagaagcgtgtccggggccggctcctaccagctcacctttgggaaggggaccaaattatcagtcattccaaatatccagaaccctgaccctgccgtgtaccagctgagagactctaaatccagtgacaagtctgtctgcctattcaccgattttgattctcaaacaaatgtgtcacaaagtaaggattctgatgtgtatatcacagacaaatgtgtgctagacatgaggtctatggacttcaagagcaacagtgctgtggcctggagcaacaaatctgactttgcatgtgcaaacgccttcaacaacagcattattccagaagacaccttcttccccagcccagaaagttcctgtgatgtcaagctggtcgagaaaagctttgaaacagatacgaacctaaactttcaaaacctgtca

SEQ ID NO: 202 - DNA, 828 bp, Artificial Sequence
  HA-1H TCR beta
atgggcaccagcctcctctgctggatggccctgtgtctcctgggggcagatcacgcagatactggagtctcccagaaccccagacacaagatcacaaagaggggacagaatgtaactttcaggtgtgatccaatttctgaacacaaccgcctttattggtaccgacagaccctggggcagggcccagagtttctgacttacttccagaatgaagctcaactagaaaaatcaaggctgctcagtgatcggttctctgcagagaggcctaagggatctttctccaccttggagatccagcgcacagagcagggggactcggccatgtatctctgtgccagcagcatcgactccttcaacgagcagttcttcgggccgggcaccaggctcacggtcctcgaggacctgaaaaacgtgttcccacccgaggtcgctgtgtttgagccatcagaagcagagatctcccacacccaaaaggccacactggtgtgcctggccacaggcttctaccccgaccacgtggagctgagctggtgggtgaatgggaaggaggtgcacagtggggtctgcacagacccgcagcccctcaaggagcagcccgccctcaatgactccagatactgcctgagcagccgcctgagggtgtcggccaccttctggcagaacccccgcaaccacttccgctgtcaagtccagttctacgggctctcggagaatgacgagtggacccaggatagggccaaacctgtcacccagatcgtcagcgccgaggcctggggtagagcagactgtggcttcacctccgagtcttaccagcaaggggtcctgtct

SEQ ID NO: 203 - protein, 13 aa, Artificial Sequence
  NY-ESO CDR
CASSLGLGYEQYF

SEQ ID NO: 204 - protein, 20 aa, Artificial Sequence
  NY-ESO CDR
CASSLGGPRGLAGLRGDEQF

SEQ ID NO: 205 - protein, 12 aa, Artificial Sequence
  NY-ESO CDR
CASSLRRDNEQF

SEQ ID NO: 206 - protein, 19 aa, Artificial Sequence
  MAGE-A3 CDR
CASSLEVLLGADFPDTQYF

SEQ ID NO: 207 - protein, 18 aa, Artificial Sequence
  MAGE-A3 CDR
CASSFPAGHGADLDNEQF

SEQ ID NO: 208 - protein, 14 aa, Artificial Sequence
  MAGE-A3 CDR
CASSEITGRIGEQF

SEQ ID NO: 209 - protein, 18 aa, Artificial Sequence
  MAGE-A3 CDR
CASSLGGDELGADGNEQF

SEQ ID NO: 210 - protein, 241 aa, Artificial Sequence
  NY-ESO-1 ScFv
DIQMTQSPSSLSASVGDRVTITCRASQSISSYLNWYQQKPGKAPKLLIYAASSLQSGVPSRFSGSGSGTDFTLTISSLQPEDFATYYCQQSYSTPLTFGGGTKVEIKGGGGSGGGGSGGGGSGGEVQLVESGGGLVQPGGSLRLSCAASGFTVYDYMSWVRQAPGKGLEWVSVIYSGGSTYYADSVKGRFTISRDNSKNTLYLQMNSLRAEDTAVYYCARYSYYYYYMDVWGKGTTVTVSS

SEQ ID NO: 211 - DNA, 723 bp, Artificial Sequence
  NY-ESO-1 ScFv
gacatccagatgacccagtctccatcctccctgtctgcatctgtaggagacagagtcaccatcacttgccgggcaagtcagagcattagcagctatttaaattggtatcagcagaaaccagggaaagcccctaagctcctgatctatgctgcatccagtttgcaaagtggggtcccatcaaggttcagtggcagtggatctgggacagatttcactctcaccatcagcagtctgcaacctgaagattttgcaacttactactgtcaacagagttacagtacccctctcactttcggcggcggaacaaaggtggagatcaagggcggaggtggaagcggagggggaggatctggcggcggaggaagcggaggcgaagtgcagctggtggaaagcggcggaggcctggtgcagcctggcggcagcctgagactgtcttgcgccgccagcggcttcaccgtgtacgactacatgagctgggtccgccaggcccctggcaagggactggaatgggtgtccgtgatctacagcggcggcagcacctactacgccgacagcgtgaagggtcgattcaccatcagccgggacaacagcaagaacaccctgtacctgcagatgaacagcctgcgggccgaggacaccgccgtgtattactgtgcgaggtactcctactactactactacatggacgtctggggcaaagggaccacggtcaccgtgtcctca

SEQ ID NO: 212 - protein, 244 aa, Artificial Sequence
  MAGE-A3 antigen binding domain
QVQLQESGPGLVKPSDTLSLTCAVSGYSISSSNWWGWIRQPPGKGLEWIGYIYYSGSTYYNPSLKSRVTMSVDTSKNQFSLKLSSVTAVDTAVYYCARIPFGDWWYFDLWGRGTLVTVSSGGGGSGGGGSGGGGSGGDIQMTQSPSSLSASVGDRVTITCRASQSISSYLNWYQQKPGKAPKLLIYAASSLQSGVPSRFSGSGSGTDFTLTISSLQPEDFATYYCQQSYSFVLTFGGGTKVEIK

SEQ ID NO: 213 - DNA, 732 bp, Artificial Sequence
  MAGE-A3 antigen binding domain
caggtgcagctgcaggaaagcggccctggcctggtgaaacccagcgacaccctgagcctgacctgcgccgtgtccggctacagcatcagcagcagcaattggtggggctggatcagacagccccctggcaagggcctggaatggatcggctacatctactacagcggcagcacctactacaaccccagcctgaagtccagagtgaccatgagcgtggacaccagcaagaaccagttcagcctgaagctgagcagcgtgaccgccgtcgataccgctgtgtattactgtgcgagaataccctttggggattggtggtacttcgatctctggggccgtggcaccctggtcactgtgtcctcaggcggaggtggaagcggagggggaggatctggcggcggaggaagcggaggcgacatccagatgacccagagccccagcagcctgagcgccagcgtgggcgacagagtgaccatcacctgtcgggccagccagtcgatcagcagctacctgaactggtatcagcagaagcccggcaaggcccccaagctgctgatctacgccgccagctccctgcagagcggcgtgccaagcagattcagcggcagcggctccggcaccgacttcaccctgaccatcagcagcctgcagcccgaggacttcgccacctactactgccagcagagttacagtttcgttctcactttcggcggagggaccaaggtggagatcaaa

SEQ ID NO: 214 - protein, 248 aa, Artificial Sequence
  MAGE-A3 antigen binding domain
QVQLVQSGAEVKKPGASVKVSCKVSGYTLTELSMHWVRQAPGKGLEWMGGFDPEDGETIYAQKFQGRVTMTEDTSTDTAYMELSSLRSEDTAVYYCATDLYSSSWYCDAFDIWGQGTMVTVSSGGGGSGGGGSGGGGSGGDIQMTQSPSSLSASVGDRVTITCRASQSISSYLNWYQQKPGKAPKLLIYAASSLQSGVPSRFSGSGSGTDFTLTISSLQPEDFATYYCQQSWASTPLTFGGGTKVEIK

SEQ ID NO: 215 - DNA, 744 bp, Artificial Sequence
  MAGE-A3 antigen binding domain
caggtgcagctggtgcagtctggcgccgaagtgaagaaacctggcgcctccgtgaaggtgtcctgcaaggtgtccggctacaccctgaccgagctgtcgatgcactgggtccgccaggcacctggcaagggactggaatggatgggcggctttgaccccgaggacggcgagacaatctacgcccagaaattccagggcagagtgaccatgaccgaggacaccagcaccgacaccgcctacatggaactgagcagcctgcggagcgaggacaccgctgtgtattactgtgcaacagatctgtatagcagcagctggtactgtgatgcttttgatatctggggccaagggacaatggtcaccgtgtcctcaggcggaggtggaagcggagggggaggatctggcggcggaggaagcggaggcgacatccagatgacccagagccccagcagcctgagcgccagcgtgggcgacagagtgaccatcacctgtcgggccagccagtcgatcagcagctacctgaactggtatcagcagaagcccggcaaggcccccaagctgctgatctacgccgccagctccctgcagagcggcgtgccaagcagattcagcggcagcggctccggcaccgacttcaccctgaccatcagcagcctgcagcccgaggacttcgccacctactactgccagcagagttgggccagcacccctctcactttcggcggagggaccaaggtggagatcaaa

SEQ ID NO: 216 - protein, 245 aa, Artificial Sequence
  HPV E6 antigen binding domain
EVQLVESGGGLVQPGGSLRLSCAASGFTFSSYWMHWVRQAPGKGLVWVSRINSDGSSTSYADSVKGRFTISRDNAKNTLYLQMNSLRAEDTAVYYCARENGVVKWYFDLWGRGTLVTVSSGGGGSGGGGSGGGGSGGDIQMTQSPSSLSASVGDRVTITCRASQSISSYLNWYQQKPGKAPKLLIYAASSLQSGVPSRFSGSGSGTDFTLTISSLQPEDFATYYCQQSYSTPLFPFGGGTKVEIK

SEQ ID NO: 217 - DNA, 735 bp, Artificial Sequence
  HPV E6 antigen binding domain
gaagtgcagctggtggaaagcggcggaggcctggtgcagcctggcggcagcctgagactgtcttgcgccgccagcggcttcaccttcagcagctactggatgcactgggtccgccaggcccctggcaagggactggtctgggtgtctcgaatcaacagcgacggcagcagcaccagctacgccgacagcgtgaagggccggttcaccatcagccgggacaacgccaagaacaccctgtacctgcagatgaacagcctgcgggccgaggacaccgccgtgtattactgtgccagggagaacggcgtggtgaagtggtacttcgacctgtggggccgtggcaccctggtcactgtgtcctcaggcggaggtggaagcggagggggaggatctggcggcggaggaagcggaggcgacatccagatgacccagagccccagcagcctgagcgccagcgtgggcgacagagtgaccatcacctgtcgggccagccagtcgatcagcagctacctgaactggtatcagcagaagcccggcaaggcccccaagctgctgatctacgccgccagctccctgcagagcggcgtgccaagcagattcagcggcagcggctccggcaccgacttcaccctgaccatcagcagcctgcagcccgaggacttcgccacctactactgccagcagagttacagtacccctctctttcccttcggcggagggaccaaggtggagatcaaa

SEQ ID NO: 218 - protein, 247 aa, Artificial Sequence
  HPV E6 antigen binding domain
EVQLVESGGGLVQPGRSLRLSCAASGFTFDDYAMHWVRQAPGKGLEWVSGISWNSGSIGYADSVKGRFTISRDNAKNSLYLQMNSLRAEDTALYYCAKDGRGSPFYGGAFDIWGQGTMVTVSSGGGGSGGGGSGGGGSGGDIQMTQSPSSLSASVGDRVTITCRASQSISSYLNWYQQKPGKAPKLLIYAASSLQSGVPSRFSGSGSGTDFTLTISSLQPEDFATYYCQQSYSTPLTFGGGTKVEIK

SEQ ID NO: 219 - DNA, 741 bp, Artificial Sequence
  HPV E6 antigen binding domain
gaagtgcagctggtggaaagcggcggaggcctggtgcagcccggtcgaagcctgagactgagctgcgccgccagcggcttcacctttgacgactacgccatgcactgggtccgccaggcccctggcaagggactggaatgggtgtccggcatcagctggaacagcggcagcatcggctacgccgacagcgtgaagggccggttcaccatcagccgggacaacgccaagaacagcctgtacctgcagatgaacagcctgcgggccgaggacaccgccttgtattactgtgccaaggacggcaggggctcccccttctacggcggcgccttcgacatctggggccaagggacaatggtcaccgtgtcctcaggcggaggtggaagcggagggggaggatctggcggcggaggaagcggaggcgacatccagatgacccagtctccatcctccctgtctgcatctgtaggagacagagtcaccatcacttgccgggcaagtcagagcattagcagctatttaaattggtatcagcagaaaccagggaaagcccctaagctcctgatctatgctgcatccagtttgcaaagtggggtcccatcaaggttcagtggcagtggatctgggacagatttcactctcaccatcagcagtctgcaacctgaagattttgcaacttactactgtcaacagagttacagtacccctctcactttcggcggcggaacaaaggtggagatcaag

SEQ ID NO: 220 - protein, 251 aa, Artificial Sequence
  HPV E7 antigen binding domain
EVQLVESGGGLVKPGGSLRLSCAASGFTFSNAWMSWVRQAPGKGLEWVGRIKSKTDGGTTDYAAPVKGRFTISRDDSKNTLYLQMNSLKTEDTAVYYCTTSYDYLLNPYRWNWFDPWGQGTLVTVSSGGGGSGGGGSGGGGSGGDIQMTQSPSSLSASVGDRVTITCRASQSISSYLNWYQQKPGKAPKLLIYAASSLQSGVPSRFSGSGSGTDFTLTISSLQPEDFATYYCQQSYSTPLTFGGGTKVEIK

SEQ ID NO: 221 - DNA, 753 bp, Artificial Sequence
  HPV E7 antigen binding domain
gaagtgcagctggtggaaagcggcggaggcctggtgaaacctggcggcagcctgagactgagctgcgccgccagcggcttcaccttctcgaacgcctggatgagctgggtccgccaggcccctggcaagggactggaatgggtcggacggatcaagagcaagaccgacggcggcaccaccgactacgctgcccccgtgaagggccggttcaccatcagccgggacgacagcaagaacaccctgtacctgcagatgaacagcctgaaaaccgaggacaccgccgtgtattactgtaccacctcctacgattaccttctcaatccttatcgttggaactggttcgacccctggggccagggaaccctggtcaccgtgtcctcaggcggaggtggaagcggagggggaggatctggcggcggaggaagcggcggagacatccagatgacccagtctccatcctccctgtctgcatctgtaggagacagagtcaccatcacttgccgggcaagtcagagcattagcagctatttaaattggtatcagcagaaaccagggaaagcccctaagctcctgatctatgctgcatccagtttgcaaagtggggtcccatcaaggttcagtggcagtggatctgggacagatttcactctcaccatcagcagtctgcaacctgaagattttgcaacttactactgtcaacagagttacagtacccctctcactttcggcggcggaacaaaggtggagatcaag

SEQ ID NO: 222 - protein, 246 aa, Artificial Sequence
  MAGE-A3 antigen binding domain
QVQLVQSGAEVKKPGSSVKVSCKASGGTFSSYAISWVRQAPGQGLEWMGGIIPIFGTANYAQKFQGRVTITADESTSTAYMELSSLRSEDTAVYYCARDMDTFSMVTLFDYWGQGTLVTVSSGGGGSGGGGSGGGGSGGDIQMTQSPSSLSASVGDRVTITCRASQSISSYLNWYQQKPGKAPKLLIYAASSLQSGVPSRFSGSGSGTDFTLTISSLQPEDFATYYCQQSYSWPLTFGGGTKVEIK

SEQ ID NO: 223 - DNA, 738 bp, Artificial Sequence
  MAGE-A3 antigen binding domain
caggtgcagctggtgcagtctggcgccgaagtgaagaaacccggcagcagcgtgaaggtgtcctgcaaggccagcggcggcaccttcagcagctacgccatcagctgggtccgccaggctcctggacagggactggaatggatgggcggcatcatccccatcttcggcaccgccaactacgcccagaaattccagggcagagtgaccatcaccgccgacgagagcaccagcaccgcctacatggaactgagcagccttcgaagcgaggacaccgctgtgtattactgtgccagggacatggacaccttctccatggtgaccctgttcgactactggggccagggcaccctggtcaccgtgtcctcaggcggaggtggaagcggagggggaggatctggcggcggaggaagcggaggcgacatccagatgacccagagccccagcagcctgagcgccagcgtgggcgacagagtgaccatcacctgtcgggccagccagtcgatcagcagctacctgaactggtatcagcagaagcccggcaaggcccccaagctgctgatctacgccgccagctccctgcagagcggcgtgccaagcagattcagcggcagcggctccggcaccgacttcaccctgaccatcagcagcctgcagcccgaggacttcgccacctactactgccagcagagttacagttggcctctcactttcggcggagggaccaaggtggagatcaaa

SEQ ID NO: 224 - protein, 245 aa, Artificial Sequence
  KRAS G12V antigen binding domain
QVTLRESGPALVKPTQTLTLTCTFSGFSLSTSGMCVSWIRQPPGKALEWLALIDWDDDKYYSTSLKTRLTISKDTSKNQVVLTMTNMDPVDTATYYCARSYDELYYFDYWGQGTLVTVSSGGGGSGGGGSGGGGSGGDIQMTQSPSSLSASVGDRVTITCRASQSIWTSYLNWYQQKPGKAPKLLIYAASSLQSGVPSRFSGSGSGTDFTLTISSLQPEDFATYYCQQSYSTPLTFGGGTKVEIK

SEQ ID NO: 225 - DNA, 735 bp, Artificial Sequence
  KRAS G12V antigen binding domain
caggtcacactgagagagtccggccctgccctggtgaaacccacccagaccctgaccctgacatgcaccttcagcggcttcagcctgagcaccagcgggatgtgcgtgtcctggattcgacagccccctggcaaggccctggaatggctggccctgattgactgggacgacgacaagtactacagcaccagcctgaaaacccggctgaccatcagcaaggacaccagcaagaaccaggtggtgctgaccatgaccaacatggaccccgtggacaccgccacgtattactgtgcacggagttacgacgagctctactactttgactactggggccagggaaccctggtcaccgtgtcctcaggcggaggtggaagcggagggggaggatctggcggcggaggaagcggaggcgacatccagatgacccagagccccagctccctctctgcatctgtgggcgacagagtgaccatcacctgtcgggccagccagtcgatctggaccagctacctgaactggtatcagcagaagcccggcaaggcccccaagctgctgatctacgccgccagctccctgcagagcggcgtgccaagcagattcagcggcagcggctccggcaccgacttcaccctgaccatcagcagcctgcagcccgaggacttcgccacctactactgccagcagagttacagtacccctctcactttcggcggagggaccaaggtggagatcaaa

SEQ ID NO: 226 - protein, 5 aa, Artificial Sequence
  linker
GGGGS

SEQ ID NO: 227 - protein, 10 aa, Artificial Sequence
  linker
GGGGSGGGGS

SEQ ID NO: 228 - protein, 15 aa, Artificial Sequence
  linker
GGGGSGGGGSGGGGS

SEQ ID NO: 229 - protein, 15 aa, Artificial Sequence
  linker
GGGGSGGGGSGGGGS

SEQ ID NO: 230 - protein, 20 aa, Artificial Sequence
  linker
GGGGSGGGGSGGGGSGGGGS

SEQ ID NO: 231 - protein, 4 aa, Artificial Sequence
  linker
GGGS

SEQ ID NO: 232 - protein, 247 aa, Artificial Sequence
  KRAS ScFv
QVQLVESGGGLVKPGGSLRLSCAASGFTFSDYYMSWIRQAPGKGLEWVSYISSSGSTIYYADSVKGRFTISRDNAKNSLYLQMNSLRAEDTAVYYCARDFTRDYYYYYYMDVWGKGTTVTVSSGGGGSGGGGSGGGGSGGDIQMTQSPSSLSASVGDRVTITCRASQSISSYLNWYQQKPGKAPKLLIYAASSLQSGVPSRFSGSGSGTDFTLTISSLQPEDFATYYCQQSYSTPLTFGGGTKVEIK

SEQ ID NO: 233 - DNA, 741 bp, Artificial Sequence
  KRAS ScFv
caggtgcagctggtggaaagcggcggaggcctggtgaaacctggcggcagcctgagactgagctgcgccgccagcggcttcaccttcagcgactactacatgagctggatcagacaggcccctggcaagggactggaatgggtgtcctacatcagcagcagcggctcgaccatctactacgccgacagcgtgaagggccggttcaccatcagccgggacaacgccaagaacagcctgtacctgcagatgaacagcctgcgggccgaggacaccgccgtgtattactgtgccagggacttcaccagggactactactactactactacatggacgtgtggggcaaagggaccacggtcaccgtgtcctcaggcggaggtggaagcggagggggaggatctggcggcggaggaagcggaggcgacatccagatgacccagtctccatcctccctgtctgcatctgtaggagacagagtcaccatcacttgccgggcaagtcagagcattagcagctatttaaattggtatcagcagaaaccagggaaagcccctaagctcctgatctatgctgcatccagtttgcaaagtggggtcccatcaaggttcagtggcagtggatctgggacagatttcactctcaccatcagcagtctgcaacctgaagattttgcaacttactactgtcaacagagttacagtacccctctcactttcggcggcggaacaaaggtggagatcaag

SEQ ID NO: 234 - protein, 244 aa, Artificial Sequence
  KRAS ScFv
QVTLRESGPALVKPTQTLTLTCTFSGFSLSTSGMCVSWIRQPPGKALEWLALIDWDDDKYYSTSLKTRLTISKDTSKNQVVLTMTNMDPVDTATYYCARSYDELYYFDYWGQGTLVTVSSGGGGSGGGGSGGGGSGGDIQMTQSPSSLSASVGDRVTITCRASQSISSYLNWYQQKPGKAPKLLIYAASSLQSGVPSRFSGSGSGTDFTLTISSLQPEDFATYYCQQSYSTPLTFGGGTKVEIK

SEQ ID NO: 235 - DNA, 732 bp, Artificial Sequence
  KRAS ScFv
caggtcacactgagagagtccggccctgccctggtgaaacccacccagaccctgaccctgacatgcaccttcagcggcttcagcctgagcaccagcgggatgtgcgtgtcctggattcgacagccccctggcaaggccctggaatggctggccctgattgactgggacgacgacaagtactacagcaccagcctgaaaacccggctgaccatcagcaaggacaccagcaagaaccaggtggtgctgaccatgaccaacatggaccccgtggacaccgccacgtattactgtgcacggagttacgacgagctctactactttgactactggggccagggaaccctggtcaccgtgtcctcaggcggaggtggaagcggagggggaggatctggcggcggaggaagcggaggcgacatccagatgacccagtctccatcctccctgtctgcatctgtaggagacagagtcaccatcacttgccgggcaagtcagagcattagcagctatttaaattggtatcagcagaaaccagggaaagcccctaagctcctgatctatgctgcatccagtttgcaaagtggggtcccatcaaggttcagtggcagtggatctgggacagatttcactctcaccatcagcagtctgcaacctgaagattttgcaacttactactgtcaacagagttacagtacccctctcactttcggcggcggaacaaaggtggagatcaag

SEQ ID NO: 236 - protein, 245 aa, Artificial Sequence; identical to SEQ ID NO: 224
  KRAS ScFv

SEQ ID NO: 237 - DNA, 735 bp, Artificial Sequence; identical to SEQ ID NO: 225
  KRAS ScFv

SEQ ID NO: 238 - protein, 244 aa, Artificial Sequence
  KRAS ScFv
QVTLRESGPALVKPTQTLTLTCTFSGFSLSTSGMCVSWIRQPPGKALEWLALIDWDDDKYYSTSLKTRLTISKDTSKNQVVLTMTNMDPVDTATYYCARSYDELYYFDYWGQGTLVTVSSGGGGSGGGGSGGGGSGGDIQMTQSPSSLSASVGDRVTITCRASQSISSYLNWYQQKPGKAPKLLIYAASSLQSGVPSRFSGSGSGTDFTLTISSLQPEDFATYYCQQSYSTRLTFGGGTKVEIK

SEQ ID NO: 239 - DNA, 732 bp, Artificial Sequence
  KRAS ScFv
caggtcacactgagagagtccggccctgccctggtgaaacccacccagaccctgaccctgacatgcaccttcagcggcttcagcctgagcaccagcgggatgtgcgtgtcctggattcgacagccccctggcaaggccctggaatggctggccctgattgactgggacgacgacaagtactacagcaccagcctgaaaacccggctgaccatcagcaaggacaccagcaagaaccaggtggtgctgaccatgaccaacatggaccccgtggacaccgccacgtattactgtgcacggagttacgacgagctctactactttgactactggggccagggaaccctggtcaccgtgtcctcaggcggaggtggaagcggagggggaggatctggcggcggaggaagcggaggcgacatccagatgacccagagccccagctccctctctgcatctgtgggcgacagagtgaccatcacctgtcgggccagccagtcgatcagcagctacctgaactggtatcagcagaagcccggcaaggcccccaagctgctgatctacgccgccagctccctgcagagcggcgtgccaagcagattcagcggcagcggctccggcaccgacttcaccctgaccatcagcagcctgcagcccgaggacttcgccacctactactgccagcagagttacagtacccggctcactttcggcggagggaccaaggtggagatcaaa

SEQ ID NO: 240 - protein, 244 aa, Artificial Sequence
  KRAS TCR alpha
MQRNLGAVLGILWVQICWVRGDQVEQSPSALSLHEGTDSALRCNFTTTMRSVQWFRQNSRGSLISLFYLASGTKENGRLKSAFDSKERRYSTLHIRDAQLEDSGTYFCAADSSNTGYQNFYFGKGTSLTVIPNIQNPEPAVYQLKDPRSQDSTLCLFTDFDSQINVPKTMESGTFITDKCVLDMKAMDSKSNGAIAWSNQTSFTCQDIFKETNATYPSSDVPCDATLTEKSFETDMNLNFQNLS

SEQ ID NO: 241 - DNA, 732 bp, Artificial Sequence
  KRAS TCR alpha
atgcagaggaacctgggagctgtgctggggattctgtgggtgcagatttgctgggtgagaggggatcaggtggagcagagtccttcagccctgagcctccacgagggaaccgattctgctctgagatgcaattttacgaccaccatgaggagtgtgcagtggttccgacagaattccaggggcagcctcatcagtttgttctacttggcttcaggaacaaaggagaatgggaggctaaagtcagcatttgattctaaggagcggcgctacagcaccctgcacatcagggatgcccagctggaggactcaggcacttacttctgtgctgctgactcttcgaacacgggttaccagaacttctattttgggaaaggaacaagtttgactgtcattccaaacatccagaacccagaacctgctgtgtaccagttaaaagatcctcggtctcaggacagcaccctctgcctgttcaccgactttgactcccaaatcaatgtgccgaaaaccatggaatctggaacgttcatcactgacaaatgtgtgctggacatgaaagctatggattccaagagcaatggggccattgcctggagcaaccagacaagcttcacctgccaagatatcttcaaagagaccaacgccacctaccccagttcagacgttccctgtgatgccacgttgaccgagaaaagctttgaaacagatatgaacctgaactttcaaaacctgtct

SEQ ID NO: 242 - protein, 283 aa, Artificial Sequence
  KRAS TCR beta
MSNTAFPDPAWNTTLLSWVALFLLGTSSANSGVVQSPRYIIKGKGERSILKCIPISGHLSVAWYQQTQGQELKFFIQHYDKMERDKGNLPSRFSVQQFDDYHSEMNMSALELEDSAVYFCASSLTDPLDSDYTFGSGTRLLVIEDLRNVTPPKVSLFEPSKAEIANKQKATLVCLARGFFPDHVELSWWVNGKEVHSGVCTDPQAYKESNYSYCLSSRLRVSATFWHNPRNHFRCQVQFHGLSEEDKWPEGSPKPVTQNISAEAWGRADCGITSASYQQGVLS

SEQ ID NO: 243 - DNA, 849 bp, Artificial Sequence
  KRAS TCR beta
atgtctaacactgccttccctgaccccgcctggaacaccaccctgctatcttgggttgctctctttctcctgggaacaagttcagcaaattctggggttgtccagtctccaagatacataatcaaaggaaagggagaaaggtccattctaaaatgtattcccatctctggacatctctctgtggcctggtatcaacagactcaggggcaggaactaaagttcttcattcagcattatgataaaatggagagagataaaggaaacctgcccagcagattctcagtccaacagtttgatgactatcactctgagatgaacatgagtgccttggagctagaggactctgccgtgtacttctgtgccagctctctcacagatccgctagactccgactacaccttcggctcagggaccaggcttttggtaatagaggatctgagaaatgtgactccacccaaggtctccttgtttgagccatcaaaagcagagattgcaaacaaacaaaaggctaccctcgtgtgcttggccaggggcttcttccctgaccacgtggagctgagctggtgggtgaatggcaaggaggtccacagtggggtctgcacggaccctcaggcctacaaggagagcaattatagctactgcctgagcagccgcctgagggtctctgctaccttctggcacaatcctcgcaaccacttccgctgccaagtgcagttccatgggctttcagaggaggacaagtggccagagggctcacccaaacctgtcacacagaacatcagtgcagaggcctggggccgagcagactgtgggattacctcagcatcctatcaacaaggggtcttgtct

SEQ ID NO: 244 - protein, 283 aa, Artificial Sequence; identical to SEQ ID NO: 242
  KRAS TCR beta

SEQ ID NO: 245 - DNA, 849 bp, Artificial Sequence; identical to SEQ ID NO: 243
  KRAS TCR beta

SEQ ID NO: 246 - protein, 248 aa, Artificial Sequence
  KRAS TCRa
MKTVTGPLFLCFWLQLNCVSRGEQVEQRPPHLSVREGDSAVITCTYTDPNSYYFFWYKQEPGASLQLLMKVFSSTEINEGQGFTVLLNKKDKRLSLNLTAAHPGDSAAYFCAVSGGTNSAGNKLTFGIGTRVLVRPDIQNPEPAVYQLKDPRSQDSTLCLFTDFDSQINVPKTMESGTFITDKCVLDMKAMDSKSNGAIAWSNQTSFTCQDIFKETNATYPSSDVPCDATLTEKSFETDMNLNFQNLS

SEQ ID NO: 247 - DNA, 744 bp, Artificial Sequence
  KRAS TCRa
atgaagacggtgactggacctttgttcctgtgcttctggctgcagctgaactgtgtgagcagaggcgagcaggtggagcagcgccctcctcacctgagtgtccgggagggagacagtgccgttatcacctgcacctacacagaccctaacagttattacttcttctggtacaagcaagagccgggggcaagtcttcagttgcttatgaaggttttctcaagtacggaaataaacgaaggacaaggattcactgtcctactgaacaagaaagacaaacgactctctctgaacctcacagctgcccatcctggggactcagccgcgtacttctgcgcagtcagtggagggactaacagtgcagggaacaagctaacttttggaattggaaccagggtgctggtcaggccagacatccagaacccagaacctgctgtgtaccagttaaaagatcctcggtctcaggacagcaccctctgcctgttcaccgactttgactcccaaatcaatgtgccgaaaaccatggaatctggaacgttcatcactgacaaatgtgtgctggacatgaaagctatggattccaagagcaatggggccattgcctggagcaaccagacaagcttcacctgccaagatatcttcaaagagaccaacgccacctaccccagttcagacgttccctgtgatgccacgttgaccgagaaaagctttgaaacagatatgaacctgaactttcaaaacctgtct

SEQ ID NO: 248 - protein, 272 aa, Artificial Sequence
  KRAS TCRb
MGCRLLSCVAFCLLGIGPLETAVFQTPNYHVTQVGNEVSFNCKQTLGHDTMYWYKQDSKKLLKIMFSYNNKQLIVNETVPRRFSPQSSDKAHLNLRIKSVEPEDSAVYLCASSRDWGPAEQFFGPGTRLTVLEDLRNVTPPKVSLFEPSKAEIANKQKATLVCLARGFFPDHVELSWWVNGKEVHSGVCTDPQAYKESNYSYCLSSRLRVSATFWHNPRNHFRCQVQFHGLSEEDKWPEGSPKPVTQNISAEAWGRADCGITSASYHQGVLS

SEQ ID NO: 249 - DNA, 816 bp, Artificial Sequence
  KRAS TCRb
atgggctgtaggctcctaagctgtgtggccttctgcctcttgggaataggccctttggagacagctgttttccagactccaaactatcatgtcacacaggtgggaaatgaagtgtctttcaattgtaagcaaactctgggccacgatactatgtattggtacaagcaagactctaagaaattgctgaagattatgtttagctacaataataagcaactcattgtaaacgaaacagttccaaggcgcttctcacctcagtcttcagataaagctcatttgaatcttcgaatcaagtctgtagagccggaggactctgctgtgtatctctgtgccagcagtcgggactgggggcctgctgagcagttcttcggaccagggacacgactcaccgtcctagaggatctgagaaatgtgactccacccaaggtctccttgtttgagccatcaaaagcagagattgcaaacaaacaaaaggctaccctcgtgtgcttggccaggggcttcttccctgaccacgtggagctgagctggtgggtgaatggcaaggaggtccacagtggggtctgcacggaccctcaggcctacaaggagagcaattatagctactgcctgagcagccgcctgagggtctctgctaccttctggcacaatcctcgaaaccacttccgctgccaagtgcagttccatgggctttcagaggaggacaagtggccagagggctcacccaaacctgtcacacagaacatcagtgcagaggcctggggccgagcagactgtggaatcacttcagcatcctatcatcagggggttctgtct

SEQ ID NO: 250 - protein, 272 aa, Artificial Sequence; identical to SEQ ID NO: 248
  KRAS TCRb

SEQ ID NO: 251 - DNA, 816 bp, Artificial Sequence; identical to SEQ ID NO: 249
  KRAS TCRb

SEQ ID NO: 252 - protein, 244 aa, Artificial Sequence; identical to SEQ ID NO: 240
  TCRa control

SEQ ID NO: 253 - DNA, 732 bp, Artificial Sequence; identical to SEQ ID NO: 241
  TCRa control

SEQ ID NO: 254 - protein, 248 aa, Artificial Sequence; identical to SEQ ID NO: 246
  TCRa control

SEQ ID NO: 255 - DNA, 744 bp, Artificial Sequence; identical to SEQ ID NO: 247
  TCRa control

SEQ ID NO: 256 - protein, 9 aa, Artificial Sequence
  mH-Y-2Db peptide
KCSRNRQYL

SEQ ID NO: 257 - protein, 614 aa, Artificial Sequence
  H-Y TCR alpha and beta
MFPVTILLLSAFFSLRGNSAQSVDQPDAHVTLSEGASLELRCSYSYSAAPYLFWYVQYPGQSLQFLLKYITGDTVVKGTKGFEAEFRKSNSSFNLKKSPAHWSDSAKYFCALEGQDQGGSAKLIFGEGTKLTVSSPDIQNPEPAVYQLKDPRSQDSTLCLFTDFDSQINVPKTMESGTFITDKTVLDMKAMDSKSNGAIAWSNQTSFTCQDIFKETNATYPSSDVPCDATLTEKSFETDMNLNFQNLSVMGLRILLLKVAGFNLLMTLRLWSSRAKRSGSGATNFSLLKQAGDVEENPGPMSNTAFPDPAWNTTLLSWVALFLLGTKHMEAAVTQSPRNKVAVTGGKVTLSCNQTNNHNNMYWYRQDTGHGLRLIHYSYGAGSTEKGDIPDGYKASRPSQENFSLILELATPSQTSVYFCASGDNSAETLYFGPGTRLTVLEDLRNVTPPKVSLFEPSKAEIANKQKATLVCLARGFFPDHVELSWWVNGKEVHSGVSTDPQAYKESNYSYCLSSRLRVSATFWHNPRNHFRCQVQFHGLSEEDKWPEGSPKPVTQNISAEAWGRADCGITSASYHQGVLSATILYEILLGKATLYAVLVSGLVLMAMVKKKNS

SEQ ID NO: 258 - DNA, 1845 bp, Artificial Sequence
  H-Y TCR alpha and beta
atgttccccgttaccatattgctcctgagtgctttcttcagtttgcgagggaactctgcccaatctgtcgatcagccagatgcacacgttaccctttccgagggtgcgtcacttgaactgaggtgttcctatagctactcagcagccccttatctgttttggtacgtacaatacccagggcagagtctccaatttctccttaaatatataaccggggacactgtagtgaaggggactaaaggttttgaagcagagtttaggaagagcaacagctccttcaaccttaagaagtcacccgcacactggtcagactccgcgaaatacttctgtgctctggaagggcaagaccagggtggaagtgccaaattgatatttggtgagggtactaaattgactgttagctcaccagacatccagaacccagaacctgctgtgtaccagttaaaagatcctcggtctcaggacagcaccctctgcctgttcaccgactttgactcccaaatcaatgtgccgaaaaccatggaatctggaacgttcatcactgacaaaactgtgctggacatgaaagctatggattccaagagcaatggggccattgcctggagcaaccagacaagcttcacctgccaagatatcttcaaagagaccaacgccacctaccccagttcagacgttccctgtgatgccacgttgaccgagaaaagctttgaaacagatatgaacctaaactttcaaaacctgtcagttatgggactccgaatcctcctgctgaaagtagcgggatttaacctgctcatgacgctgaggctgtggtccagtcgggccaagcggtccggatccggagccaccaacttcagcctgctgaagcaggccggcgacgtggaggagaaccccggccccatgtctaatactgcatttccagatccggcctggaatactacactccttagttgggttgccctcttcctccttggcacgaagcacatggaagccgccgtcacccagagtccgagaaacaaagtagcggtcaccggcggtaaggtaacattgagttgtaaccaaacgaacaaccataacaatatgtactggtatagacaagacacaggccatggcttgcgcctgattcactacagctatggagcggggagtacggagaagggtgatattcccgatggctataaagcctctcggcctagccaggagaattttagtttgatcctggagctcgcaacccccagtcagactagcgtctacttttgtgcctcaggcgacaatagtgcggaaaccctttacttcggccctgggacaagacttacagttctagaggatctgagaaatgtgactccacccaaggtctccttgtttgagccatcaaaagcagagattgcaaacaaacaaaaggctaccctcgtgtgcttggccaggggcttcttccctgaccacgtggagctgagctggtgggtgaatggcaaggaggtccacagtggggtcagcacggaccctcaggcctacaaggagagcaattatagctactgcctgagcagccgcctgagggtctctgctaccttctggcacaatcctcgaaaccacttccgctgccaagtgcagttccatgggctttcagaggaggacaagtggccagagggctcacccaaacctgtcacacagaacatcagtgcagaggcctggggccgagcagactgtggaatcacttcagcatcctatcatcagggggttctgtctgcaaccatcctctatgagatcctactggggaaggccaccctatatgctgtgctggtcagtggcctggtgctgatggccatggtcaagaaaaaaaattcctag

SEQ ID NO: 259 - protein, 619 aa, Artificial Sequence
  H-Y TCR alpha and beta
MFPVTILLLSAFFSLRGNSAQSVDQPDAHVTLSEGASLELRCSYSYSAAPYLFWYVQYPGQSLQFLLKYITGDTVVKGTKGFEAEFRKSNSSFNLKKSPAHWSDSAKYFCALEGQDQGGSAKLIFGEGTKLTVSSPYIQNPDPAVYQLRDSKSSDKSVCLFTDFDSQTNVSQSKDSDVYITDKCVLDMRSMDFKSNSAVAWSNKSDFACANAFNNSIIPEDTFFPSPESSCDVKLVEKSFETDTNLNFQNLSVIGFRILLLKVAGFNLLMTLRLWSSGSGATNFSLLKQAGDVEENPGPMSNTAFPDPAWNTTLLSWVALFLLGTKHMEAAVTQSPRNKVAVTGGKVTLSCNQTNNHNNMYWYRQDTGHGLRLIHYSYGAGSTEKGDIPDGYKASRPSQENFSLILELATPSQTSVYFCASGDNSAETLYFGPGTRLTVLEDLKNVFPPEVAVFEPSEAEISHTQKATLVCLATGFYPDHVELSWWVNGKEVHSGVCTDPQPLKEQPALNDSRYCLSSRLRVSATFWQNPRNHFRCQVQFYGLSENDEWTQDRAKPVTQIVSAEAWGRADCGFTSESYQQGVLSATILYEILLGKATLYAVLVSALVLMAMVKRKDSRG

SEQ ID NO: 260 - DNA, 1860 bp, Artificial Sequence
  H-Y TCR alpha and beta
atgttccccgttaccatattgctcctgagtgctttcttcagtttgcgagggaactctgcccaatctgtcgatcagccagatgcacacgttaccctttccgagggtgcgtcacttgaactgaggtgttcctatagctactcagcagccccttatctgttttggtacgtacaatacccagggcagagtctccaatttctccttaaatatataaccggggacactgtagtgaaggggactaaaggttttgaagcagagtttaggaagagcaacagctccttcaaccttaagaagtcacccgcacactggtcagactccgcgaaatacttctgtgctctggaagggcaagaccagggtggaagtgccaaattgatatttggtgagggtactaaattgactgttagctcaccgtatatccagaaccctgaccctgccgtgtaccagctgagagactctaaatccagtgacaagtctgtctgcctattcaccgattttgattctcaaacaaatgtgtcacaaagtaaggattctgatgtgtatatcacagacaaatgtgtgctagacatgaggtctatggacttcaagagcaacagtgctgtggcctggagcaacaaatctgactttgcatgtgcaaacgccttcaacaacagcattattccagaagacaccttcttccccagcccagaaagttcctgtgatgtcaagctggtcgagaaaagctttgaaacagatacgaacctaaactttcaaaacctgtcagtgattgggttccgaatcctcctcctgaaagtggccgggtttaatctgctcatgacgctgcggctgtggtccagcggatccggagccaccaacttcagcctgctgaagcaggccggcgacgtggaggagaaccccggccccatgtctaatactgcatttccagatccggcctggaatactacactccttagttgggttgccctcttcctccttggcacgaagcacatggaagccgccgtcacccagagtccgagaaacaaagtagcggtcaccggcggtaaggtaacattgagttgtaaccaaacgaacaaccataacaatatgtactggtatagacaagacacaggccatggcttgcgcctgattcactacagctatggagcggggagtacggagaagggtgatattcccgatggctataaagcctctcggcctagccaggagaattttagtttgatcctggagctcgcaacccccagtcagactagcgtctacttttgtgcctcaggcgacaatagtgcggaaaccctttacttcggccctgggacaagacttacagttctggaggacctgaaaaacgtgttcccacccgaggtcgctgtgtttgagccatcagaagcagagatctcccacacccaaaaggccacactggtgtgcctggccacaggcttctaccccgaccacgtggagctgagctggtgggtgaatgggaaggaggtgcacagtggggtctgcacagacccgcagcccctcaaggagcagcccgccctcaatgactccagatactgcctgagcagccgcctgagggtgtcggccaccttctggcagaacccccgcaaccacttccgctgtcaagtccagttctacgggctctcggagaatgacgagtggacccaggatagggccaaacctgtcacccagatcgtcagcgccgaggcctggggtagagcagactgtggcttcacctccgagtcttaccagcaaggggtcctgtctgccaccatcctctatgagatcttgctagggaaggccaccttgtatgccgtgctggtcagtgccctcgtgctgatggccatggtcaagagaaaggattccagaggctag

SEQ ID NO: 261 - protein, 614 aa, Artificial Sequence
  H-Y TCR alpha and beta
MFPVTILLLSAFFSLRGNSAQSVDQPDAHVTLSEGASLELRCSYSYSAAPYLFWYVQYPGQSLQFLLKYITGDTVVKGTKGFEAEFRKSNSSFNLKKSPAHWSDSAKYFCALEGQDQGGSAKLIFGEGTKLTVSSPDIQNPEPAVYQLKDPRSQDSTLCLFTDFDSQINVPKTMESGTFITDKTVLDMKAMDSKSNGAIAWSNQTSFTCQDIFKETNATYPSSDVPCDATLTEKSFETDMNLNFQNLSVMGLRILLLKVAGFNLLMTLRLWSSRAKRSGSGATNFSLLKQAGDVEENPGPMSNTAFPDPAWNTTLLSWVALFLLGTKHMEAAVTQSPRNKVAVTGGKVTLSCNQTNNHNNMYWYRQDTGHGLRLIHYSYGAGSTEKGDIPDGYKASRPSQENFSLILELATPSQTSVYFCASGDNSAETLYFGPGTRLLVLEDLRNVTPPKVSLFEPSKAEIANKQKATLVCLARGFFPDHVELSWWVNGKEVHSGVSTDPQAYKESNYSYCLSSRLRVSATFWHNPRNHFRCQVQFHGLSEEDKWPEGSPKPVTQNISAEAWGRADCGITSASYHQGVLSATILYEILLGKATLYAVLVSGLVLMAMVKKKNS

SEQ ID NO: 262 - DNA, 1845 bp, Artificial Sequence
  H-Y TCR alpha and beta
atgttccccgttaccatattgctcctgagtgctttcttcagtttgcgagggaactctgcccaatctgtcgatcagccagatgcacacgttaccctttccgagggtgcgtcacttgaactgaggtgttcctatagctactcagcagccccttatctgttttggtacgtacaatacccagggcagagtctccaatttctccttaaatatataaccggggacactgtagtgaaggggactaaaggttttgaagcagagtttaggaagagcaacagctccttcaaccttaagaagtcacccgcacactggtcagactccgcgaaatacttctgtgctctggaagggcaagaccagggtggaagtgccaaattgatatttggtgagggtactaaattgactgttagctcaccagacatccagaacccagaacctgctgtgtaccagttaaaagatcctcggtctcaggacagcaccctctgcctgttcaccgactttgactcccaaatcaatgtgccgaaaaccatggaatctggaacgttcatcactgacaaaactgtgctggacatgaaagctatggattccaagagcaatggggccattgcctggagcaaccagacaagcttcacctgccaagatatcttcaaagagaccaacgccacctaccccagttcagacgttccctgtgatgccacgttgaccgagaaaagctttgaaacagatatgaacctaaactttcaaaacctgtcagttatgggactccgaatcctcctgctgaaagtagcgggatttaacctgctcatgacgctgaggctgtggtccagtcgggccaagcggtccggatccggagccaccaacttcagcctgctgaagcaggccggcgacgtggaggagaaccccggccccatgtctaatactgcatttccagatccggcctggaatactacactccttagttgggttgccctcttcctccttggcacgaagcacatggaagccgccgtcacccagagtccgagaaacaaagtagcggtcaccggcggtaaggtaacattgagttgtaaccaaacgaacaaccataacaatatgtactggtatagacaagacacaggccatggcttgcgcctgattcactacagctatggagcggggagtacggagaagggtgatattcccgatggctataaagcctctcggcctagccaggagaattttagtttgatcctggagctcgcaacccccagtcagactagcgtctacttttgtgcctcaggcgacaatagtgcggaaaccctttacttcggccctgggacaagacttttggttctagaggatctgagaaatgtgactccacccaaggtctccttgtttgagccatcaaaagcagagattgcaaacaaacaaaaggctaccctcgtgtgcttggccaggggcttcttccctgaccacgtggagctgagctggtgggtgaatggcaaggaggtccacagtggggtcagcacggaccctcaggcctacaaggagagcaattatagctactgcctgagcagccgcctgagggtctctgctaccttctggcacaatcctcgaaaccacttccgctgccaagtgcagttccatgggctttcagaggaggacaagtggccagagggctcacccaaacctgtcacacagaacatcagtgcagaggcctggggccgagcagactgtggaatcacttcagcatcctatcatcagggggttctgtctgcaaccatcctctatgagatcctactggggaaggccaccctatatgctgtgctggtcagtggcctggtgctgatggccatggtcaagaaaaaaaattcctag

SEQ ID NO: 263 - protein, 619 aa, Artificial Sequence
  H-Y TCR alpha and beta
MFPVTILLLSAFFSLRGNSAQSVDQPDAHVTLSEGASLELRCSYSYSAAPYLFWYVQYPGQSLQFLLKYITGDTVVKGTKGFEAEFRKSNSSFNLKKSPAHWSDSAKYFCALEGQDQGGSAKLIFGEGTKLTVSSPYIQNPDPAVYQLRDSKSSDKSVCLFTDFDSQTNVSQSKDSDVYITDKCVLDMRSMDFKSNSAVAWSNKSDFACANAFNNSIIPEDTFFPSPESSCDVKLVEKSFETDTNLNFQNLSVIGFRILLLKVAGFNLLMTLRLWSSGSGATNFSLLKQAGDVEENPGPMSNTAFPDPAWNTTLLSWVALFLLGTKHMEAAVTQSPRNKVAVTGGKVTLSCNQTNNHNNMYWYRQDTGHGLRLIHYSYGAGSTEKGDIPDGYKASRPSQENFSLILELATPSQTSVYFCASGDNSAETLYFGPGTRLLVLEDLKNVFPPEVAVFEPSEAEISHTQKATLVCLATGFYPDHVELSWWVNGKEVHSGVCTDPQPLKEQPALNDSRYCLSSRLRVSATFWQNPRNHFRCQVQFYGLSENDEWTQDRAKPVTQIVSAEAWGRADCGFTSESYQQGVLSATILYEILLGKATLYAVLVSALVLMAMVKRKDSRG

SEQ ID NO: 264 - DNA, 1860 bp, Artificial Sequence
  H-Y TCR alpha and beta
atgttccccgttaccatattgctcctgagtgctttcttcagtttgcgagggaactctgcccaatctgtcgatcagccagatgcacacgttaccctttccgagggtgcgtcacttgaactgaggtgttcctatagctactcagcagccccttatctgttttggtacgtacaatacccagggcagagtctccaatttctccttaaatatataaccggggacactgtagtgaaggggactaaaggttttgaagcagagtttaggaagagcaacagctccttcaaccttaagaagtcacccgcacactggtcagactccgcgaaatacttctgtgctctggaagggcaagaccagggtggaagtgccaaattgatatttggtgagggtactaaattgactgttagctcaccgtatatccagaaccctgaccctgccgtgtaccagctgagagactctaaatccagtgacaagtctgtctgcctattcaccgattttgattctcaaacaaatgtgtcacaaagtaaggattctgatgtgtatatcacagacaaatgtgtgctagacatgaggtctatggacttcaagagcaacagtgctgtggcctggagcaacaaatctgactttgcatgtgcaaacgccttcaacaacagcattattccagaagacaccttcttccccagcccagaaagttcctgtgatgtcaagctggtcgagaaaagctttgaaacagatacgaacctaaactttcaaaacctgtcagtgattgggttccgaatcctcctcctgaaagtggccgggtttaatctgctcatgacgctgcggctgtggtccagcggatccggagccaccaacttcagcctgctgaagcaggccggcgacgtggaggagaaccccggccccatgtctaatactgcatttccagatccggcctggaatactacactccttagttgggttgccctcttcctccttggcacgaagcacatggaagccgccgtcacccagagtccgagaaacaaagtagcggtcaccggcggtaaggtaacattgagttgtaaccaaacgaacaaccataacaatatgtactggtatagacaagacacaggccatggcttgcgcctgattcactacagctatggagcggggagtacggagaagggtgatattcccgatggctataaagcctctcggcctagccaggagaattttagtttgatcctggagctcgcaacccccagtcagactagcgtctacttttgtgcctcaggcgacaatagtgcggaaaccctttacttcggccctgggacaagacttttggttctggaggacctgaaaaacgtgttcccacccgaggtcgctgtgtttgagccatcagaagcagagatctcccacacccaaaaggccacactggtgtgcctggccacaggcttctaccccgaccacgtggagctgagctggtgggtgaatgggaaggaggtgcacagtggggtctgcacagacccgcagcccctcaaggagcagcccgccctcaatgactccagatactgcctgagcagccgcctgagggtgtcggccaccttctggcagaacccccgcaaccacttccgctgtcaagtccagttctacgggctctcggagaatgacgagtggacccaggatagggccaaacctgtcacccagatcgtcagcgccgaggcctggggtagagcagactgtggcttcacctccgagtcttaccagcaaggggtcctgtctgccaccatcctctatgagatcttgctagggaaggccaccttgtatgccgtgctggtcagtgccctcgtgctgatggccatggtcaagagaaaggattccagaggctag

SEQ ID NO: 265 - protein, 9 aa, Artificial Sequence
  NY-ESO-1
SLLMWITQV

SEQ ID NO: 266 - protein, 9 aa, Artificial Sequence
  HA-1(R) peptide
VLRDDLLEA

SEQ ID NO: 267 - protein, 607 aa, Artificial Sequence
  NY-ESO-1 TCR alpha and beta
METLLGLLILWLQLQWVSSKQEVTQIPAALSVPEGENLVLNCSFTDSAIYNLQWFRQDPGKGLTSLLLIQSSQREQTSGRLNASLDKSSGRSTLYIAASQPGDSATYLCAVRPLYGGSYIPTFGRGTSLIVHPYIQNPDPAVYQLRDSKSSDKSVCLFTDFDSQTNVSQSKDSDVYITDKCVLDMRSMDFKSNSAVAWSNKSDFACANAFNNSIIPEDTFFPSPESSCDVKLVEKSFETDTNLNFQNLSVIGFRILLLKVAGFNLLMTLRLWSSGSGATNFSLLKQAGDVEENPGPMSIGLLCCAALSLLWAGPVNAGVTQTPKFQVLKTGQSMTLQCAQDMNHEYMSWYRQDPGMGLRLIHYSVGAGITDQGEVPNGYNVSRSTTEDFPLRLLSAAPSQTSVYFCASSYVGNTGELFFGEGSRLTVLEDLKNVFPPEVAVFEPSEAEISHTQKATLVCLATGFYPDHVELSWWVNGKEVHSGVCTDPQPLKEQPALNDSRYCLSSRLRVSATFWQNPRNHFRCQVQFYGLSENDEWTQDRAKPVTQIVSAEAWGRADCGFTSESYQQGVLSATILYEILLGKATLYAVLVSALVLMAMVKRKDSRG

SEQ ID NO: 268 - DNA, 1824 bp, Artificial Sequence
  NY-ESO-1 TCR alpha and beta
atggagacactcttgggcctgcttatcctttggctgcagctgcaatgggtgagcagcaaacaggaggtgacgcagattcctgcagctctgagtgtcccagaaggagaaaacttggttctgaactgcagtttcactgatagcgctatttacaacctccagtggtttaggcaggaccctgggaaaggactcacatctctgttgcttattcagtcaagtcagagagagcaaacaagtggaagacttaatgcctcgctggataaatcatcaggacgtagtactttatacattgcagcttctcagcctggtgactcagccacctacctctgtgctgtgaggcccctctacggaggaagctacatacctacatttggaagaggaaccagccttattgttcatccgtatatccagaaccctgaccctgccgtgtaccagctgagagactctaaatccagtgacaagtctgtctgcctattcaccgattttgattctcaaacaaatgtgtcacaaagtaaggattctgatgtgtatatcacagacaaatgtgtgctagacatgaggtctatggacttcaagagcaacagtgctgtggcctggagcaacaaatctgactttgcatgtgcaaacgccttcaacaacagcattattccagaagacaccttcttccccagcccagaaagttcctgtgatgtcaagctggtcgagaaaagctttgaaacagatacgaacctaaactttcaaaacctgtcagtgattgggttccgaatcctcctcctgaaagtggccgggtttaatctgctcatgacgctgcggctgtggtccagcggatccggagccaccaacttcagcctgctgaagcaggccggcgacgtggaggagaaccccggccccatgagcatcggcctcctgtgctgtgcagccttgtctctcctgtgggcaggtccagtgaatgctggtgtcactcagaccccaaaattccaggtcctgaagacaggacagagcatgacactgcagtgtgcccaggatatgaaccatgaatacatgtcctggtatcgacaagacccaggcatggggctgaggctgattcattactcagttggtgctggtatcactgaccaaggagaagtccccaatggctacaatgtctccagatcaaccacagaggatttcccgctcaggctgctgtcggctgctccctcccagacatctgtgtacttctgtgccagcagttacgtcgggaacaccggggagctgttttttggagaaggctctaggctgaccgtactggaggacctgaaaaacgtgttcccacccgaggtcgctgtgtttgagccatcagaagcagagatctcccacacccaaaaggccacactggtgtgcctggccacaggcttctaccccgaccacgtggagctgagctggtgggtgaatgggaaggaggtgcacagtggggtctgcacagacccgcagcccctcaaggagcagcccgccctcaatgactccagatactgcctgagcagccgcctgagggtgtcggccaccttctggcagaacccccgcaaccacttccgctgtcaagtccagttctacgggctctcggagaatgacgagtggacccaggatagggccaaacctgtcacccagatcgtcagcgccgaggcctggggtagagcagactgtggcttcacctccgagtcttaccagcaaggggtcctgtctgccaccatcctctatgagatcttgctagggaaggccaccttgtatgccgtgctggtcagtgccctcgtgctgatggccatggtcaagagaaaggattccagaggctag

SEQ ID NO: 269 - protein, 612 aa, Artificial Sequence
  KRAS TCR
MQRNLGAVLGILWVQICWVRGDQVEQSPSALSLHEGTDSALRCNFTTTMRSVQWFRQNSRGSLISLFYLASGTKENGRLKSAFDSKERRYSTLHIRDAQLEDSGTYFCAADSSNTGYQNFYFGKGTSLTVIPNIQNPEPAVYQLKDPRSQDSTLCLFTDFDSQINVPKTMESGTFITDKTVLDMKAMDSKSNGAIAWSNQTSFTCQDIFKETNATYPSSDVPCDATLTEKSFETDMNLNFQNLSVMGLRILLLKVAGFNLLMTLRLWSSRAKRSGSGATNFSLLKQAGDVEENPGPMSNTAFPDPAWNTTLLSWVALFLLGTSSANSGVVQSPRYIIKGKGERSILKCIPISGHLSVAWYQQTQGQELKFFIQHYDKMERDKGNLPSRFSVQQFDDYHSEMNMSALELEDSAVYFCASSLTDPLDSDYTFGSGTRLLVIEDLRNVTPPKVSLFEPSKAEIANKQKATLVCLARGFFPDHVELSWWVNGKEVHSGVSTDPQAYKESNYSYCLSSRLRVSATFWHNPRNHFRCQVQFHGLSEEDKWPEGSPKPVTQNISAEAWGRADCGITSASYQQGVLSATILYEILLGKATLYAVLVSTLVVMAMVKRKNS

SEQ ID NO: 270 - DNA, 1839 bp, Artificial Sequence
  KRAS TCR
atgcagaggaacctgggagctgtgctggggattctgtgggtgcagatttgctgggtgagaggggatcaggtggagcagagtccttcagccctgagcctccacgagggaaccgattctgctctgagatgcaattttacgaccaccatgaggagtgtgcagtggttccgacagaattccaggggcagcctcatcagtttgttctacttggcttcaggaacaaaggagaatgggaggctaaagtcagcatttgattctaaggagcggcgctacagcaccctgcacatcagggatgcccagctggaggactcaggcacttacttctgtgctgctgactcttcgaacacgggttaccagaacttctattttgggaaaggaacaagtttgactgtcattccaaacatccagaacccagaacctgctgtgtaccagttaaaagatcctcggtctcaggacagcaccctctgcctgttcaccgactttgactcccaaatcaatgtgccgaaaaccatggaatctggaacgttcatcactgacaaaactgtgctggacatgaaagctatggattccaagagcaatggggccattgcctggagcaaccagacaagcttcacctgccaagatatcttcaaagagaccaacgccacctaccccagttcagacgttccctgtgatgccacgttgaccgagaaaagctttgaaacagatatgaacctgaactttcaaaacctgtcagttatgggactccgaatcctcctgctgaaagtagcgggatttaacctgctcatgacgctgaggctgtggtccagtcgggccaagcggtccggatccggagccaccaacttcagcctgctgaagcaggccggcgacgtggaggagaaccccggccccatgtctaacactgccttccctgaccccgcctggaacaccaccctgctatcttgggttgctctctttctcctgggaacaagttcagcaaattctggggttgtccagtctccaagatacataatcaaaggaaagggagaaaggtccattctaaaatgtattcccatctctggacatctctctgtggcctggtatcaacagactcaggggcaggaactaaagttcttcattcagcattatgataaaatggagagagataaaggaaacctgcccagcagattctcagtccaacagtttgatgactatcactctgagatgaacatgagtgccttggagctagaggactctgccgtgtacttctgtgccagctctctcacagatccgctagactccgactacaccttcggctcagggaccaggcttttggtaatagaggatctgagaaatgtgactccacccaaggtctccttgtttgagccatcaaaagcagagattgcaaacaaacaaaaggctaccctcgtgtgcttggccaggggcttcttccctgaccacgtggagctgagctggtgggtgaatggcaaggaggtccacagtggggtcagcacggaccctcaggcctacaaggagagcaattatagctactgcctgagcagccgcctgagggtctctgctaccttctggcacaatcctcgcaaccacttccgctgccaagtgcagttccatgggctttcagaggaggacaagtggccagagggctcacccaaacctgtcacacagaacatcagtgcagaggcctggggccgagcagactgtgggattacctcagcatcctatcaacaaggggtcttgtctgccaccatcctctatgagatcctgctagggaaagccaccctgtatgctgtgcttgtcagtacactggtggtgatggctatggtcaaaagaaagaattcatag

SEQ ID NO: 271 - protein, 18 aa, Artificial Sequence
  T2A self cleaving peptide
EGRGSLLTCGDVEENPGP

SEQ ID NO: 272 - protein, 20 aa, Artificial Sequence
  E2A self cleaving peptide
QCTNYALLKLAGDVESNPGP

SEQ ID NO: 273 - protein, 22 aa, Artificial Sequence
  F2A self cleaving peptide
VKQTLNFDLLKLAGDVESNPGP

SEQ ID NO: 274 - protein, 6 aa, Artificial Sequence
  ITIM
  Z (1)..(1): Z is S, I V or L
  X (2)..(2): X is any amino acid
  X (4)..(5): X is any amino acid
  Z (6)..(6): Z is I, V or L
ZXYXXZ

SEQ ID NO: 275 - protein, 242 aa, Artificial Sequence
  CD19 ScFv
DIQMTQTTSSLSASLGDRVTISCRASQDISKYLNWYQQKPDGTVKLLIYHTSRLHSGVPSRFSGSGSGTDYSLTISNLEQEDIATYFCQQGNTLPYTFGGGTKLEITGGGGSGGGGSGGGGSEVKLQESGPGLVAPSQSLSVTCTVSGVSLPDYGVSWIRQPPRKGLEWLGVIWGSETTYYNSALKSRLTIIKDNSKSQVFLKMNSLQTDDTAIYYCAKHYYYGGSYAMDYWGQGTSVTVSS

SEQ ID NO: 276 - DNA, 726 bp, Artificial Sequence
  CD19 ScFv
gacatccagatgacacagactacatcctccctgtctgcctctctgggagacagagtcaccatcagttgcagggcaagtcaggacattagtaaatatttaaattggtatcagcagaaaccagatggaactgttaaactcctgatctaccatacatcaagattacactcaggagtcccatcaaggttcagtggcagtgggtctggaacagattattctctcaccattagcaacctggagcaagaagatattgccacttacttttgccaacagggtaatacgcttccgtacacgttcggaggggggaccaagctggagatcacaggtggcggtggctcgggcggtggtgggtcgggtggcggcggatctgaggtgaaactgcaggagtcaggacctggcctggtggcgccctcacagagcctgtccgtcacatgcactgtctcaggggtctcattacccgactatggtgtaagctggattcgccagcctccacgaaagggtctggagtggctgggagtaatatggggtagtgaaaccacatactataattcagctctcaaatccagactgaccatcatcaaggacaactccaagagccaagttttcttaaaaatgaacagtctgcaaactgatgacacagccatttactactgtgccaaacattattactacggtggtagctatgctatggactactggggccaaggaacctcagtcaccgtgtcctca

SEQ ID NO: 277 - protein, 244 aa, Artificial Sequence
  CD19 ScFv
DIQMTQTTSSLSASLGDRVTISCRASQDISKYLNWYQQKPDGTVKLLIYHTSRLHSGVPSRFSGSGSGTDYSLTISNLEQEDIATYFCQQGNTLPYTFGGGTKLEITGGGGSGGGGSGGGGSGGEVKLQESGPGLVAPSQSLSVTCTVSGVSLPDYGVSWIRQPPRKGLEWLGVIWGSETTYYNSALKSRLTIIKDNSKSQVFLKMNSLQTDDTAIYYCAKHYYYGGSYAMDYWGQGTSVTVSS

SEQ ID NO: 278 - DNA, 732 bp, Artificial Sequence
  CD19 ScFv
gacatccagatgacacagactacatcctccctgtctgcctctctgggagacagagtcaccatcagttgcagggcaagtcaggacattagtaaatatttaaattggtatcagcagaaaccagatggaactgttaaactcctgatctaccatacatcaagattacactcaggagtcccatcaaggttcagtggcagtgggtctggaacagattattctctcaccattagcaacctggagcaagaagatattgccacttacttttgccaacagggtaatacgcttccgtacacgttcggaggggggaccaagctggagatcacaggcggaggtggaagcggagggggaggatctggcggcggaggaagcggaggcgaggtgaaactgcaggagtcaggacctggcctggtggcgccctcacagagcctgtccgtcacatgcactgtctcaggggtctcattacccgactatggtgtaagctggattcgccagcctccacgaaagggtctggagtggctgggagtaatatggggtagtgaaaccacatactataattcagctctcaaatccagactgaccatcatcaaggacaactccaagagccaagttttcttaaaaatgaacagtctgcaaactgatgacacagccatttactactgtgccaaacattattactacggtggtagctatgctatggactactggggccaaggaacctcagtcaccgtgtcctca

SEQ ID NO: 279 - protein, 509 aa, Artificial Sequence
  CD19 CAR
DIQMTQTTSSLSASLGDRVTISCRASQDISKYLNWYQQKPDGTVKLLIYHTSRLHSGVPSRFSGSGSGTDYSLTISNLEQEDIATYFCQQGNTLPYTFGGGTKLEITGGGGSGGGGSGGGGSEVKLQESGPGLVAPSQSLSVTCTVSGVSLPDYGVSWIRQPPRKGLEWLGVIWGSETTYYNSALKSRLTIIKDNSKSQVFLKMNSLQTDDTAIYYCAKHYYYGGSYAMDYWGQGTSVTVSSTTTPAPRPPTPAPTIASQPLSLRPEACRPAAGGAVHTRGLDFACDFWVLVVVGGVLACYSLLVTVAFIIFWVRSKRSRLLHSDYMNMTPRRPGPTRKHYQPYAPPRDFAAYRSKRGRKKLLYIFKQPFMRPVQTTQEEDGCSCRFPEEEEGGCELRVKFSRSADAPAYKQGQNQLYNELNLGRREEYDVLDKRRGRDPEMGGKPRRKNPQEGLYNELQKDKMAEAYSEIGMKGERRRGKGHDGLYQGLSTATKDTYDALHMQALPPR

SEQ ID NO: 280 - DNA, 1527 bp, Artificial Sequence
  CD19 CAR
gacatccagatgacacagactacatcctccctgtctgcctctctgggagacagagtcaccatcagttgcagggcaagtcaggacattagtaaatatttaaattggtatcagcagaaaccagatggaactgttaaactcctgatctaccatacatcaagattacactcaggagtcccatcaaggttcagtggcagtgggtctggaacagattattctctcaccattagcaacctggagcaagaagatattgccacttacttttgccaacagggtaatacgcttccgtacacgttcggaggggggaccaagctggagatcacaggtggcggtggctcgggcggtggtgggtcgggtggcggcggatctgaggtgaaactgcaggagtcaggacctggcctggtggcgccctcacagagcctgtccgtcacatgcactgtctcaggggtctcattacccgactatggtgtaagctggattcgccagcctccacgaaagggtctggagtggctgggagtaatatggggtagtgaaaccacatactataattcagctctcaaatccagactgaccatcatcaaggacaactccaagagccaagttttcttaaaaatgaacagtctgcaaactgatgacacagccatttactactgtgccaaacattattactacggtggtagctatgctatggactactggggccaaggaacctcagtcaccgtgtcctcaaccacgacgccagcgccgcgaccaccaacaccggcgcccaccatcgcgtcgcagcccctgtccctgcgcccagaggcgtgccggccagcggcggggggcgcagtgcacacgagggggctggacttcgcctgtgatttctgggtgctggtcgttgtgggcggcgtgctggcctgctacagcctgctggtgacagtggccttcatcatcttttgggtgaggagcaagcggagcagactgctgcacagcgactacatgaacatgaccccccggaggcctggccccacccggaagcactaccagccctacgcccctcccagggatttcgccgcctaccggagcaaacggggcagaaagaaactcctgtatatattcaaacaaccatttatgaggccagtacaaactactcaagaggaagatggctgtagctgccgatttccagaagaagaagaaggaggatgtgaactgagagtgaagttcagcaggagcgcagacgcccccgcgtacaagcagggccagaaccagctctataacgagctcaatctaggacgaagagaggagtacgatgttttggacaagcgtagaggccgggaccctgagatggggggaaagccgagaaggaagaaccctcaggaaggcctgtacaatgaactgcagaaagataagatggcggaggcctacagtgagattgggatgaaaggcgagcgccggaggggcaaggggcacgatggcctttaccagggactcagtacagccaccaaggacacctacgacgcccttcacatgcaggccctgccccctcgc

SEQ ID NO: 281 - protein, 509 aa, Artificial Sequence; identical to SEQ ID NO: 279
  CD19 CAR

SEQ ID NO: 282 - protein, 246 aa, Artificial Sequence
  CEA ScFv
QVQLVQSGSELKKPGASVKVSCKASGYTFTEFGMNWVRQAPGQGLEWMGWINTKTGEATYVEEFKGRFVFSLDTSVSTAYLQISSLKAEDTAVYYCARWDFAYYVEAMDYWGQGTTVTVSSGGGGSGGGGSGGGGSGGDIQMTQSPSSLSASVGDRVTITCKASQNVGTNVAWYQQKPGKAPKLLIYSASYRYSGVPSRFSGSGSGTDFTLTISSLQPEDFATYYCHQYYTYPLFTFGQGTKLEIK

SEQ ID NO: 283 - DNA, 1542 bp, Artificial Sequence
  CEA ScFv
caggtgcagctggtgcaatctgggtctgagttgaagaagcctggggcctcagtgaaggtttcctgcaaggcttctggatacaccttcactgagtttggaatgaactgggtgcgacaggcccctggacaagggcttgagtggatgggatggataaacaccaaaactggagaggcaacatatgttgaagagtttaagggacggtttgtcttctccttggacacctctgtcagcacggcatatctgcagatcagcagcctaaaggctgaagacactgccgtgtattactgtgcgagatgggacttcgcttattacgtggaggctatggactactggggccaagggaccacggtcaccgtctcctcaggcggaggtggaagcggagggggaggatctggcggcggaggaagcggaggcgatatccagatgacccagtctccatcctccctgtctgcatctgtgggagacagagtcaccatcacttgcaaggccagtcagaatgtgggtactaatgttgcctggtatcagcagaaaccagggaaagcacctaagctcctgatctattcggcatcctaccgctacagtggagtcccatcaaggttcagtggcagtggatctgggacagatttcactctcaccatcagcagtctgcaacctgaagatttcgcaacttactactgtcaccaatattacacctatcctctattcacgtttggccagggcaccaagctcgagatcaagatggacatgagggtccccgctcagctcctggggctcctgctactctggctccgaggtgccagatgtcaggtgcagctggtgcaatctgggtctgagttgaagaagcctggggcctcagtgaaggtttcctgcaaggcttctggatacaccttcactgagtttggaatgaactgggtgcgacaggcccctggacaagggcttgagtggatgggatggataaacaccaaaactggagaggcaacatatgttgaagagtttaagggacggtttgtcttctccttggacacctctgtcagcacggcatatctgcagatcagcagcctaaaggctgaagacactgccgtgtattactgtgcgagatgggacttcgcttattacgtggaggctatggactactggggccaagggaccacggtcaccgtctcctcaggcggaggtggaagcggagggggaggatctggcggcggaggaagcggaggcgatatccagatgacccagtctccatcctccctgtctgcatctgtgggagacagagtcaccatcacttgcaaggccagtcagaatgtgggtactaatgttgcctggtatcagcagaaaccagggaaagcacctaagctcctgatctattcggcatcctaccgctacagtggagtcccatcaaggttcagtggcagtggatctgggacagatttcactctcaccatcagcagtctgcaacctgaagatttcgcaacttactactgtcaccaatattacacctatcctctattcacgtttggccagggcaccaagctcgagatcaag

SEQ ID NO: 284 - protein, 246 aa, Artificial Sequence
  CEA ScFv
QVQLVQSGAEVKKPGASVKVSCKASGYTFTEFGMNWVRQAPGQGLEWMGWINTKTGEATYVEEFKGRVTFTTDTSTSTAYMELRSLRSDDTAVYYCARWDFAYYVEAMDYWGQGTTVTVSSGGGGSGGGGSGGGGSGGDIQMTQSPSSLSASVGDRVTITCKASAAVGTYVAWYQQKPGKAPKLLIYSASYRKRGVPSRFSGSGSGTDFTLTISSLQPEDFATYYCHQYYTYPLFTFGQGTKLEIK

SEQ ID NO: 285 - DNA, 738 bp, Artificial Sequence
  CEA ScFv
caggtgcagctggtgcagtctggcgccgaagtgaagaaacctggagctagtgtgaaggtgtcctgcaaggccagcggctacaccttcaccgagttcggcatgaactgggtccgacaggctccaggccagggcctcgaatggatgggctggatcaacaccaagaccggcgaggccacctacgtggaagagttcaagggcagagtgaccttcaccacggacaccagcaccagcaccgcctacatggaactgcggagcctgagaagcgacgacaccgccgtgtactactgcgccagatgggacttcgcttattacgtggaagccatggactactggggccagggcaccaccgtgaccgtgtctagcggcggaggtggaagcggagggggaggatctggcggcggaggaagcggaggcgatatccagatgacccagtctccatcctccctgtctgcatctgtgggagacagagtcaccatcacttgcaaggccagtgcggctgtgggtacgtatgttgcgtggtatcagcagaaaccagggaaagcacctaagctcctgatctattcggcatcctaccgcaaaaggggagtcccatcaaggttcagtggcagtggatctgggacagatttcactctcaccatcagcagtctgcaacctgaagatttcgcaacttactactgtcaccaatattacacctatcctctattcacgtttggccagggcaccaagctcgagatcaag

SEQ ID NO: 286 - protein, 246 aa, Artificial Sequence
  CEA ScFv
QVQLVQSGSELKKPGASVKVSCKASGYTFTEFGMNWVRQAPGQGLEWMGWINTKTGEATYVEEFKGRFVFSLDTSVSTAYLQISSLKAEDTAVYYCARWDFAHYFQTMDYWGQGTTVTVSSGGGGSGGGGSGGGGSGGDIQMTQSPSSLSASVGDRVTITCKASAAVGTYVAWYQQKPGKAPKLLIYSASYRKRGVPSRFSGSGSGTDFTLTISSLQPEDFATYYCHQYYTYPLFTFGQGTKLEIK

SEQ ID NO: 287 - DNA, 738 bp, Artificial Sequence
  CEA ScFv
caggtgcagctggtgcaatctgggtctgagttgaagaagcctggggcctcagtgaaggtttcctgcaaggcttctggatacaccttcactgagtttggaatgaactgggtgcgacaggcccctggacaagggcttgagtggatgggatggataaacaccaaaactggagaggcaacatatgttgaagagtttaagggacggtttgtcttctccttggacacctctgtcagcacggcatatctgcagatcagcagcctaaaggctgaagacactgccgtgtattactgtgcgagatgggactttgctcattactttcagactatggactactggggccaagggaccacggtcaccgtctcctcaggcggaggtggaagcggagggggaggatctggcggcggaggaagcggaggcgatatccagatgacccagtctccatcctccctgtctgcatctgtgggagacagagtcaccatcacttgcaaggccagtgcggctgtgggtacgtatgttgcgtggtatcagcagaaaccagggaaagcacctaagctcctgatctattcggcatcctaccgcaaaaggggagtcccatcaaggttcagtggcagtggatctgggacagatttcactctcaccatcagcagtctgcaacctgaagatttcgcaacttactactgtcaccaatattacacctatcctctattcacgtttggccagggcaccaagctcgagatcaag

SEQ ID NO: 288 - protein, 535 aa, Artificial Sequence
  CEA CAR
MDMRVPAQLLGLLLLWLRGARCQVQLVQSGSELKKPGASVKVSCKASGYTFTEFGMNWVRQAPGQGLEWMGWINTKTGEATYVEEFKGRFVFSLDTSVSTAYLQISSLKAEDTAVYYCARWDFAYYVEAMDYWGQGTTVTVSSGGGGSGGGGSGGGGSGGDIQMTQSPSSLSASVGDRVTITCKASQNVGTNVAWYQQKPGKAPKLLIYSASYRYSGVPSRFSGSGSGTDFTLTISSLQPEDFATYYCHQYYTYPLFTFGQGTKLEIKTTTPAPRPPTPAPTIASQPLSLRPEACRPAAGGAVHTRGLDFACDFWVLVVVGGVLACYSLLVTVAFIIFWVRSKRSRLLHSDYMNMTPRRPGPTRKHYQPYAPPRDFAAYRSKRGRKKLLYIFKQPFMRPVQTTQEEDGCSCRFPEEEEGGCELRVKFSRSADAPAYKQGQNQLYNELNLGRREEYDVLDKRRGRDPEMGGKPRRKNPQEGLYNELQKDKMAEAYSEIGMKGERRRGKGHDGLYQGLSTATKDTYDALHMQALPPR

SEQ ID NO: 289 - DNA, 1608 bp, Artificial Sequence
  CEA CAR
atggacatgagggtccccgctcagctcctggggctcctgctactctggctccgaggtgccagatgtcaggtgcagctggtgcaatctgggtctgagttgaagaagcctggggcctcagtgaaggtttcctgcaaggcttctggatacaccttcactgagtttggaatgaactgggtgcgacaggcccctggacaagggcttgagtggatgggatggataaacaccaaaactggagaggcaacatatgttgaagagtttaagggacggtttgtcttctccttggacacctctgtcagcacggcatatctgcagatcagcagcctaaaggctgaagacactgccgtgtattactgtgcgagatgggacttcgcttattacgtggaggctatggactactggggccaagggaccacggtcaccgtctcctcaggcggaggtggaagcggagggggaggatctggcggcggaggaagcggaggcgatatccagatgacccagtctccatcctccctgtctgcatctgtgggagacagagtcaccatcacttgcaaggccagtcagaatgtgggtactaatgttgcctggtatcagcagaaaccagggaaagcacctaagctcctgatctattcggcatcctaccgctacagtggagtcccatcaaggttcagtggcagtggatctgggacagatttcactctcaccatcagcagtctgcaacctgaagatttcgcaacttactactgtcaccaatattacacctatcctctattcacgtttggccagggcaccaagctcgagatcaagacaacgacgccagctccccgcccgccaacccctgcacctacgattgcatcacaaccgctgtccctgcggcctgaagcttgtcgcccagccgcaggtggcgccgtacatacacgggggctggattttgcctgtgatttctgggtgctggtcgttgtgggcggcgtgctggcctgctacagcctgctggtgacagtggccttcatcatcttttgggtgaggagcaagcggagtcgactgctgcacagcgactacatgaacatgaccccccggaggcctggccccacccggaagcactaccagccctacgcccctcccagggatttcgccgcctaccggagcaaacggggcagaaagaaactcctgtatatattcaaacaaccatttatgaggccagtacaaactactcaagaggaagatggctgtagctgccgatttccagaagaagaagaaggaggatgtgaactgagagtgaagttcagcaggagcgcagacgcccccgcgtacaagcagggccagaaccagctctataacgagctcaatctaggacgaagagaggagtacgatgttttggacaagcgtagaggccgggaccctgagatggggggaaagccgagaaggaagaaccctcaggaaggcctgtacaatgaactgcagaaagataagatggcggaggcctacagtgagattgggatgaaaggcgagcgccggaggggcaaggggcacgatggcctttaccagggactcagtacagccaccaaggacacctacgacgcccttcacatgcaggccctgccccctcgctag

SEQ ID NO: 290 - protein, 537 aa, Artificial Sequence
  CEA CAR
MDMRVPAQLLGLLLLWLRGARCQVQLVQSGAEVKKPGASVKVSCKASGYTFTEFGMNWVRQAPGQGLEWMGWINTKTGEATYVEEFKGRVTFTTDTSTSTAYMELRSLRSDDTAVYYCARWDFAYYVEAMDYWGQGTTVTVSSGGGGSGGGGSGGGGSGGDIQMTQSPSSLSASVGDRVTITCKASAAVGTYVAWYQQKPGKAPKLLIYSASYRKRGVPSRFSGSGSGTDFTLTISSLQPEDFATYYCHQYYTYPLFTFGQGTKLEIKRTTTTPAPRPPTPAPTIASQPLSLRPEACRPAAGGAVHTRGLDFACDFWVLVVVGGVLACYSLLVTVAFIIFWVRSKRSRLLHSDYMNMTPRRPGPTRKHYQPYAPPRDFAAYRSKRGRKKLLYIFKQPFMRPVQTTQEEDGCSCRFPEEEEGGCELRVKFSRSADAPAYKQGQNQLYNELNLGRREEYDVLDKRRGRDPEMGGKPRRKNPQEGLYNELQKDKMAEAYSEIGMKGERRRGKGHDGLYQGLSTATKDTYDALHMQALPPR

SEQ ID NO: 291 - DNA, 1614 bp, Artificial Sequence
  CEA CAR
atggacatgagggtccccgctcagctcctggggctcctgctactctggctccgaggtgccagatgtcaggtgcagctggtgcagtctggcgccgaagtgaagaaacctggagctagtgtgaaggtgtcctgcaaggccagcggctacaccttcaccgagttcggcatgaactgggtccgacaggctccaggccagggcctcgaatggatgggctggatcaacaccaagaccggcgaggccacctacgtggaagagttcaagggcagagtgaccttcaccacggacaccagcaccagcaccgcctacatggaactgcggagcctgagaagcgacgacaccgccgtgtactactgcgccagatgggacttcgcttattacgtggaagccatggactactggggccagggcaccaccgtgaccgtgtctagcggcggaggtggaagcggagggggaggatctggcggcggaggaagcggaggcgatatccagatgacccagtctccatcctccctgtctgcatctgtgggagacagagtcaccatcacttgcaaggccagtgcggctgtgggtacgtatgttgcgtggtatcagcagaaaccagggaaagcacctaagctcctgatctattcggcatcctaccgcaaaaggggagtcccatcaaggttcagtggcagtggatctgggacagatttcactctcaccatcagcagtctgcaacctgaagatttcgcaacttactactgtcaccaatattacacctatcctctattcacgtttggccagggcaccaagctcgagatcaagcgtacgacaacgacgccagctccccgcccgccaacccctgcacctacgattgcatcacaaccgctgtccctgcggcctgaagcttgtcgcccagccgcaggtggcgccgtacatacacgggggctggattttgcctgtgatttctgggtgctggtcgttgtgggcggcgtgctggcctgctacagcctgctggtgacagtggccttcatcatcttttgggtgaggagcaagcggagtcgactgctgcacagcgactacatgaacatgaccccccggaggcctggccccacccggaagcactaccagccctacgcccctcccagggatttcgccgcctaccggagcaaacggggcagaaagaaactcctgtatatattcaaacaaccatttatgaggccagtacaaactactcaagaggaagatggctgtagctgccgatttccagaagaagaagaaggaggatgtgaactgagagtgaagttcagcaggagcgcagacgcccccgcgtacaagcagggccagaaccagctctataacgagctcaatctaggacgaagagaggagtacgatgttttggacaagcgtagaggccgggaccctgagatggggggaaagccgagaaggaagaaccctcaggaaggcctgtacaatgaactgcagaaagataagatggcggaggcctacagtgagattgggatgaaaggcgagcgccggaggggcaaggggcacgatggcctttaccagggactcagtacagccaccaaggacacctacgacgcccttcacatgcaggccctgccccctcgctag

SEQ ID NO: 292 - protein, 536 aa, Artificial Sequence
  CEA CAR
MDMRVPAQLLGLLLLWLRGARCQVQLVQSGSELKKPGASVKVSCKASGYTFTEFGMNWVRQAPGQGLEWMGWINTKTGEATYVEEFKGRFVFSLDTSVSTAYLQISSLKAEDTAVYYCARWDFAHYFQTMDYWGQGTTVTVSSGGGGSGGGGSGGGGSGGDIQMTQSPSSLSASVGDRVTITCKASAAVGTYVAWYQQKPGKAPKLLIYSASYRKRGVPSRFSGSGSGTDFTLTISSLQPEDFATYYCHQYYTYPLFTFGQGTKLEIKRTTTPAPRPPTPAPTIASQPLSLRPEACRPAAGGAVHTRGLDFACDFWVLVVVGGVLACYSLLVTVAFIIFWVRSKRSRLLHSDYMNMTPRRPGPTRKHYQPYAPPRDFAAYRSKRGRKKLLYIFKQPFMRPVQTTQEEDGCSCRFPEEEEGGCELRVKFSRSADAPAYKQGQNQLYNELNLGRREEYDVLDKRRGRDPEMGGKPRRKNPQEGLYNELQKDKMAEAYSEIGMKGERRRGKGHDGLYQGLSTATKDTYDALHMQALPPR

SEQ ID NO: 293 - DNA, 1611 bp, Artificial Sequence
  CEA CAR
atggacatgagggtccccgctcagctcctggggctcctgctactctggctccgaggtgccagatgtcaggtgcagctggtgcaatctgggtctgagttgaagaagcctggggcctcagtgaaggtttcctgcaaggcttctggatacaccttcactgagtttggaatgaactgggtgcgacaggcccctggacaagggcttgagtggatgggatggataaacaccaaaactggagaggcaacatatgttgaagagtttaagggacggtttgtcttctccttggacacctctgtcagcacggcatatctgcagatcagcagcctaaaggctgaagacactgccgtgtattactgtgcgagatgggactttgctcattactttcagactatggactactggggccaagggaccacggtcaccgtctcctcaggcggaggtggaagcggagggggaggatctggcggcggaggaagcggaggcgatatccagatgacccagtctccatcctccctgtctgcatctgtgggagacagagtcaccatcacttgcaaggccagtgcggctgtgggtacgtatgttgcgtggtatcagcagaaaccagggaaagcacctaagctcctgatctattcggcatcctaccgcaaaaggggagtcccatcaaggttcagtggcagtggatctgggacagatttcactctcaccatcagcagtctgcaacctgaagatttcgcaacttactactgtcaccaatattacacctatcctctattcacgtttggccagggcaccaagctcgagatcaagcgtacaacgacgccagctccccgcccgccaacccctgcacctacgattgcatcacaaccgctgtccctgcggcctgaagcttgtcgcccagccgcaggtggcgccgtacatacacgggggctggattttgcctgtgatttctgggtgctggtcgttgtgggcggcgtgctggcctgctacagcctgctggtgacagtggccttcatcatcttttgggtgaggagcaagcggagtcgactgctgcacagcgactacatgaacatgaccccccggaggcctggccccacccggaagcactaccagccctacgcccctcccagggatttcgccgcctaccggagcaaacggggcagaaagaaactcctgtatatattcaaacaaccatttatgaggccagtacaaactactcaagaggaagatggctgtagctgccgatttccagaagaagaagaaggaggatgtgaactgagagtgaagttcagcaggagcgcagacgcccccgcgtacaagcagggccagaaccagctctataacgagctcaatctaggacgaagagaggagtacgatgttttggacaagcgtagaggccgggaccctgagatggggggaaagccgagaaggaagaaccctcaggaaggcctgtacaatgaactgcagaaagataagatggcggaggcctacagtgagattgggatgaaaggcgagcgccggaggggcaaggggcacgatggcctttaccagggactcagtacagccaccaaggacacctacgacgcccttcacatgcaggccctgccccctcgctag

SEQ ID NO: 294 - protein, 5 aa, Artificial Sequence
  CEA CDR-H1
EFGMN

SEQ ID NO: 295 - protein, 17 aa, Artificial Sequence
  CEA CDR-H2
WINTKTGEATYVEEFKG

SEQ ID NO: 296 - protein, 12 aa, Artificial Sequence
  CEA CDR-H3
WDFAYYVEAMDY

SEQ ID NO: 297 - protein, 12 aa, Artificial Sequence
  CEA CDR-H3
WDFAHYFQTMDY

SEQ ID NO: 298 - protein, 11 aa, Artificial Sequence
  CEA CDR-L1
KASQNVGTNVA

SEQ ID NO: 299 - protein, 11 aa, Artificial Sequence
  CEA CDR-L1
KASAAVGTYVA

SEQ ID NO: 300 - protein, 7 aa, Artificial Sequence
  CEA CDR-L2
SASYRYS

SEQ ID NO: 301 - protein, 7 aa, Artificial Sequence
  CEA CDR-L2
SASYRKR

SEQ ID NO: 302 - protein, 10 aa, Artificial Sequence
  CEA CDR-L3
HQYYTYPLFT

SEQ ID NO: 303 - protein, 10 aa, Artificial Sequence
  LB-CYBA-1Y peptide
  X (10)..(10): X is Y or H
STMERWGQKX

SEQ ID NO: 304 - protein, 11 aa, Artificial Sequence
  LB-OAS1-1R
  X (7)..(7): X is R or T
ETDDPRXYQKY

SEQ ID NO: 305 - protein, 9 aa, Artificial Sequence
  HA-2 peptide
  X (9)..(9): X is V or M
YIGEVLVSX

SEQ ID NO: 306 - protein, 9 aa, Artificial Sequence
  HA-8 peptide
  X (1)..(1): X is R or P
XTLDKVLEV

SEQ ID NO: 307 - protein, 9 aa, Artificial Sequence
  HA-3 peptide
  X (2)..(2): X is T or M
VXEPGTAQY

SEQ ID NO: 308 - protein, 11 aa, Artificial Sequence
  HwA11-S peptide
  X (6)..(6): X is S or T
CIPPDXLLFPA

SEQ ID NO: 309 - protein, 11 aa, Artificial Sequence
  LB-ADIR-1F peptide
  X (9)..(9): X is F or S
SVAPALALXPA

SEQ ID NO: 310 - protein, 9 aa, Artificial Sequence
  LB-HIVEP1-1S peptide
  X (6)..(6): X is S or N
SLPKHXVTI

SEQ ID NO: 311 - protein, 9 aa, Artificial Sequence
  LB-NISCH-1A peptide
  X (7)..(7): X is A or V
ALAPAPXEV

SEQ ID NO: 312 - protein, 9 aa, Artificial Sequence
  LB-SSR1-1S peptide
  X (1)..(1): X is S or L
XLAVAQDLT

SEQ ID NO: 313 - protein, 10 aa, Artificial Sequence
  LB-WNK1-1I peptide
  X (7)..(7): X is I or M
RTLSPEXITV

SEQ ID NO: 314 - protein, 10 aa, Artificial Sequence
  T4A peptide
  X (10)..(10): X is A or E
GLYTYWSAGX

SEQ ID NO: 315 - protein, 9 aa, Artificial Sequence
  UTA2-1 peptide
  X (3)..(3): X is L or P
QLXNSVLTL

SEQ ID NO: 316 - protein, 9 aa, Artificial Sequence
  LB-CLYBL-1Y peptide
  X (5)..(5): X is Y or D
SLAAXIPRL

SEQ ID NO: 317 - protein, 10 aa, Artificial Sequence
  TRIM22 peptide
  X (7)..(7): X is C or R
MAVPPCXIGV

SEQ ID NO: 318 - protein, 11 aa, Artificial Sequence
  PARP10-1L peptide
  X (3)..(3): X is L or P
GLXGQEGLVEI

SEQ ID NO: 319 - protein, 9 aa, Artificial Sequence
  FAM119A-1T peptide
  X (8)..(8): X is T or I
AMLERQFXV

SEQ ID NO: 320 - protein, 9 aa, Artificial Sequence
  GLRX3-1S peptide
  X (3)..(3): X is S or P
FLXSANEHL

SEQ ID NO: 321 - protein, 9 aa, Artificial Sequence
  HNF4G-1M peptide
  X (2)..(2): X is M or I
MXYKDILLL

SEQ ID NO: 322 - protein, 9 aa, Artificial Sequence
  HMMR-1V peptide
  X (6)..(6): X is V or A
SLQEKXAKA

SEQ ID NO: 323 - protein, 9 aa, Artificial Sequence
  BCL2A1 peptide
  X (4)..(4): X is N or K
VLQXVAFSV

SEQ ID NO: 324 - protein, 10 aa, Artificial Sequence
  CDC26-1F peptide
  X (1)..(1): X is F or S
XVAGTQEVFV

SEQ ID NO: 325 - protein, 10 aa, Artificial Sequence
  APOBEC3F-1S/A peptide
  X (3)..(3): X is S or A
FLXEHPNVTL

SEQ ID NO: 326 - protein, 9 aa, Artificial Sequence
  LB-PRCP-1D peptide
  X (8)..(8): X is D or E
FMWDVAEXL

SEQ ID NO: 327 - protein, 11 aa, Artificial Sequence
  LB-PRCP-1D peptide
  X (8)..(8): X is D or E
FMWDVAEXLKA

SEQ ID NO: 328 - protein, 9 aa, Artificial Sequence
  LB-CCL4-1T peptide
  X (7)..(7): X is T or S
CADPSEXWV

SEQ ID NO: 329 - protein, 9 aa, Artificial Sequence
  LB-NCAPD3-1Q peptide
  X (3)..(3): X is Q or R
WLXGVVPVV

SEQ ID NO: 330 - protein, 9 aa, Artificial Sequence
  LB-NDC80-1P peptide
  X (7)..(7): X is P or A
HLEEQIXKV

SEQ ID NO: 331 - protein, 9 aa, Artificial Sequence
  LB-TTK-1D peptide
  X (4)..(4): X is D or E
RLHXGRVFV

SEQ ID NO: 332 - protein, 9 aa, Artificial Sequence
  WDR27-1L peptide
  X (2)..(2): X is L or P
SXDDHVVAV

SEQ ID NO: 333 - protein, 11 aa, Artificial Sequence
  MIIP peptide
  X (8)..(8): X is K or E
SEESAVPXRSW

SEQ ID NO: 334 - protein, 10 aa, Artificial Sequence
  MIIP peptide
  X (7)..(7): X is K or E
EESAVPXRSW

SEQ ID NO: 335 - protein, 9 aa, Artificial Sequence
  LB-DHX33-1C peptide
  X (9)..(9): X is C or R
YLYEGGISX

SEQ ID NO: 336 - protein, 10 aa, Artificial Sequence
  PANE1 peptide
RVWDLPGVLK

SEQ ID NO: 337 - protein, 10 aa, Artificial Sequence
  SP110 peptide
  X (4)..(4): X is R or G
SLPXGTSTPK

SEQ ID NO: 338 - protein, 9 aa, Artificial Sequence
  ACC-1C/Y
  X (5)..(5): X is Y or C
DYLQXVLQI

SEQ ID NO: 339 - protein, 9 aa, Artificial Sequence
  P2RX7 peptide
  X (6)..(6): X is H or R
WFHHCXPKY

SEQ ID NO: 340 - protein, 9 aa, Artificial Sequence
  ACC-4 peptide
  X (9)..(9): X is R or G
ATLPLLCAX

SEQ ID NO: 341 - protein, 10 aa, Artificial Sequence
  ACC-5
  X (10)..(10): X is R or G
WATLPLLCAX

SEQ ID NO: 342 - protein, 9 aa, Artificial Sequence
  AKAP13 peptide
  X (9)..(9): X is M or T
APAGVREVX

SEQ ID NO: 343 - protein, 10 aa, Artificial Sequence
  LB-APOBEC3B-1K peptide
  X (1)..(1): X is K or E
XPQYHAEMCF

SEQ ID NO: 344 - protein, 9 aa, Artificial Sequence
  APOBEC3H peptide
  X (5)..(5): X is K or E
KPQQXGLRL

SEQ ID NO: 345 - protein, 8 aa, Artificial Sequence
  LB-ARHGDIB-1R peptide
  X (6)..(6): X is R or P
PRACWXEA

SEQ ID NO: 346 - protein, 10 aa, Artificial Sequence
  LB-BCAT2-1R peptide
  X (3)..(3): X is R or T
QPXRALLFVI

SEQ ID NO: 347 - protein, 11 aa, Artificial Sequence
  BFAR peptide
  X (11)..(11): X is M or R
APNTGRANQQX

SEQ ID NO: 348 - protein, 11 aa, Artificial Sequence
  C14orf169 peptide
  X (4)..(4): X is A or V
RPRXPTEELAL

SEQ ID NO: 349 - protein, 11 aa, Artificial Sequence
  LB-C16ORF-1R peptide
  X (1)..(1): X is R or W
XPCPSVGLSFL

SEQ ID NO: 350 - protein, 9 aa, Artificial Sequence
  C18orf21 peptide
  X (6)..(6): X is A or T
NPATPXSKL

SEQ ID NO: 351 - protein, 10 aa, Artificial Sequence
  LB-EBI3-1I peptide
  X (8)..(8): X is I or V
RPRARYYXQV

SEQ ID NO: 352 - protein, 9 aa, Artificial Sequence
  POP1 peptide
  X (7)..(7): X is N or K
LPQKKSXAL

SEQ ID NO: 353 - protein, 9 aa, Artificial Sequence
  SCRIB peptide
  X (7)..(7): X is L or P
LPQQPPXSL

SEQ ID NO: 354 - protein, 9 aa, Artificial Sequence
  MTRR peptide
  X (5)..(5): X is S or L
SPASXRTDL

SEQ ID NO: 355 - protein, 9 aa, Artificial Sequence
  LLGL2
  X (5)..(5): X is R or H
SPSLXILAI

SEQ ID NO: 356 - protein, 11 aa, Artificial Sequence
  LB-ECGF-1H peptide
  X (3)..(3): X is H or R
RPXAIRRPLAL

SEQ ID NO: 357 - protein, 11 aa, Artificial Sequence
  LB-ERAP1-1R peptide
  X (3)..(3): X is R or P
HPXQEQIALLA

SEQ ID NO: 358 - protein, 9 aa, Artificial Sequence
  LB-ERAP1-1R peptide
  X (3)..(3): X is R or P
HPXQEQIAL

SEQ ID NO: 359 - protein, 9 aa, Artificial Sequence
  LB-FUCA2-1V peptide
  X (5)..(5): X is V or M
RLRQXGSWL

SEQ ID NO: 360 - protein, 9 aa, Artificial Sequence
  LB-GEMIN4-1V peptide
  X (9)..(9): X is V or E
FPALRFVEX

SEQ ID NO: 361 - protein, 11 aa, Artificial Sequence
  HDGF peptide
  X (11)..(11): X is L or P
LPMEVEKNSTX

SEQ ID NO: 362 - protein, 11 aa, Artificial Sequence
  LB-PDCD11-1F peptide
  X (8)..(8): X is F or L
GPDSSKTXLCL

SEQ ID NO: 363 - protein, 9 aa, Artificial Sequence
  LB-PFAS-1P peptide
  X (2)..(2): X is P or S
AXGHTRRKL

SEQ ID NO: 364 - protein, 10 aa, Artificial Sequence
  LB-TEP1-1S peptide
  X (9)..(9): X is S or P
APDGAKVAXL

SEQ ID NO: 365 - protein, 11 aa, Artificial Sequence
  LB-TMEM8A-1I peptide
  X (7)..(7): X is I or V
RPRSVTXQPLL

SEQ ID NO: 366 - protein, 10 aa, Artificial Sequence
  LB-USP15-1I peptide
  X (8)..(8): X is I or T
MPSHLRNXLL

SEQ ID NO: 367 - protein, 9 aa, Artificial Sequence
  LRH-1 peptide
TPNQRQNVC

SEQ ID NO: 368 - protein, 9 aa, Artificial Sequence
  LB-MOB3A-1C peptide
  X (1)..(1): X is C or S
XPRPGTWTC

SEQ ID NO: 369 - protein, 11 aa, Artificial Sequence
  LB-ZDHHC6-1Y peptide
  X (4)..(4): X is Y or H
RPRXWILLVKI

SEQ ID NO: 370 - protein, 10 aa, Artificial Sequence
  ZAPHIR peptide
IPRDSWWVEL

SEQ ID NO: 371 - protein, 9 aa, Artificial Sequence
  HEATR1 peptide
  X (7)..(7): X is E or G
ISKERAXAL

SEQ ID NO: 372 - protein, 9 aa, Artificial Sequence
  LB-GSTP1-1V peptide
  X (7)..(7): X is V or I
DLRCKYXSL

SEQ ID NO: 373 - protein, 9 aa, Artificial Sequence
  HA-1/B60 peptide
  X (6)..(6): X is H or R
KECVLXDDL

SEQ ID NO: 374 - protein, 9 aa, Artificial Sequence
  LB-SON-1R peptide
  X (6)..(6): X is R or C
SETKQXTVL

SEQ ID NO: 375 - protein, 9 aa, Artificial Sequence
  LB-SWAP70-1Q peptide
  X (6)..(6): X is Q or E
MEQLEXLEL

SEQ ID NO: 376 - protein, 9 aa, Artificial Sequence
  LB-TRIP10-1EPC peptide
  X (2)..(2): X is E or G
  X (3)..(3): X is P or S
  X (7)..(7): X is C or G
GXXQDLXTL

SEQ ID NO: 377 - protein, 9 aa, Artificial Sequence
  LB-NUP133-1R peptide
  X (8)..(8): X is R or Q
SEDLILCXL

SEQ ID NO: 378 - protein, 11 aa, Artificial Sequence
  LB-ZNFX1-1Q peptide
  X (8)..(8): X is Q or H
NEIEDVWXLDL

SEQ ID NO: 379 - protein, 11 aa, Artificial Sequence
  SLC1A5 peptide
  X (3)..(3): X is A or P
AEXTANGGLAL

SEQ ID NO: 380 - protein, 10 aa, Artificial Sequence
  ACC-2 peptide
  X (6)..(6): X is D or G
KEFEDXIINW

SEQ ID NO: 381 - protein, 11 aa, Artificial Sequence
  ACC-6 peptide
MEIFIEVFSHF

SEQ ID NO: 382 - protein, 10 aa, Artificial Sequence
  HB-1H/Y peptide
  X (8)..(8): X is H or Y
EEKRGSLXVW

SEQ ID NO: 383 - protein, 9 aa, Artificial Sequence
  DPH1 peptide
  X (2)..(2): X is V or L
SXLPEVDVW

SEQ ID NO: 384 - protein, 9 aa, Artificial Sequence
  UGT2B17/A02 peptide
CVATMIFMI

SEQ ID NO: 385 - protein, 10 aa, Artificial Sequence
  UGT2B17/A29
AELLNIPFLY

SEQ ID NO: 386 - protein, 10 aa, Artificial Sequence
  UGT2B17/B44 peptide
AELLNIPFLY

SEQ ID NO: 387 - protein, 9 aa, Artificial Sequence
  DFFRY peptide
  X (4)..(4): X is C or S
IVDXLTEMY

SEQ ID NO: 388 - protein, 9 aa, Artificial Sequence
  SMCY peptide
FIDSYICQV

SEQ ID NO: 389 - protein, 11 aa, Artificial Sequence
  TMSB4Y peptide
EVLLRPGLHFR

SEQ ID NO: 390 - DNA, 1533 bp, Artificial Sequence
  CD19 CAR
gacatccagatgacacagactacatcctccctgtctgcctctctgggagacagagtcaccatcagttgcagggcaagtcaggacattagtaaatatttaaattggtatcagcagaaaccagatggaactgttaaactcctgatctaccatacatcaagattacactcaggagtcccatcaaggttcagtggcagtgggtctggaacagattattctctcaccattagcaacctggagcaagaagatattgccacttacttttgccaacagggtaatacgcttccgtacacgttcggaggggggaccaagctggagatcacaggcggaggtggaagcggagggggaggatctggcggcggaggaagcggaggcgaggtgaaactgcaggagtcaggacctggcctggtggcgccctcacagagcctgtccgtcacatgcactgtctcaggggtctcattacccgactatggtgtaagctggattcgccagcctccacgaaagggtctggagtggctgggagtaatatggggtagtgaaaccacatactataattcagctctcaaatccagactgaccatcatcaaggacaactccaagagccaagttttcttaaaaatgaacagtctgcaaactgatgacacagccatttactactgtgccaaacattattactacggtggtagctatgctatggactactggggccaaggaacctcagtcaccgtgtcctcaaccacgacgccagcgccgcgaccaccaacaccggcgcccaccatcgcgtcgcagcccctgtccctgcgcccagaggcgtgccggccagcggcggggggcgcagtgcacacgagggggctggacttcgcctgtgatttctgggtgctggtcgttgtgggcggcgtgctggcctgctacagcctgctggtgacagtggccttcatcatcttttgggtgaggagcaagcggagcagactgctgcacagcgactacatgaacatgaccccccggaggcctggccccacccggaagcactaccagccctacgcccctcccagggatttcgccgcctaccggagcaaacggggcagaaagaaactcctgtatatattcaaacaaccatttatgaggccagtacaaactactcaagaggaagatggctgtagctgccgatttccagaagaagaagaaggaggatgtgaactgagagtgaagttcagcaggagcgcagacgcccccgcgtacaagcagggccagaaccagctctataacgagctcaatctaggacgaagagaggagtacgatgttttggacaagcgtagaggccgggaccctgagatggggggaaagccgagaaggaagaaccctcaggaaggcctgtacaatgaactgcagaaagataagatggcggaggcctacagtgagattgggatgaaaggcgagcgccggaggggcaaggggcacgatggcctttaccagggactcagtacagccaccaaggacacctacgacgcccttcacatgcaggccctgccccctcgc

SEQ ID NO: 391 - protein, 245 aa, Artificial Sequence
  EGFR ScFv
QVQLQESGPGLVKPSQTLSLTCTVSGGSISSGDYYWSWIRQPPGKGLEWIGYIYYSGSTDYNPSLKSRVTMSVDTSKNQFSLKVNSVTAADTAVYYCARVSIFGVGTFDYWGQGTLVTVSSGGGGSGGGGSGGGGSGGEIVMTQSPATLSLSPGERATLSCRASQSVSSYLAWYQQKPGQAPRLLIYDASNRATGIPARFSGSGSGTDFTLTISSLEPEDFAVYYCHQYGSTPLTFGGGTKAEIK

SEQ ID NO: 392 - DNA, 360 bp, Homo sapiens
atgtctcgctccgtggccttagctgtgctcgcgctactctctctttctggcctggaggctatccagcgtactccaaagattcaggtttactcacgtcatccagcagagaatggaaagtcaaatttcctgaattgctatgtgtctgggtttcatccatccgacattgaagttgacttactgaagaatggagagagaattgaaaaagtggagcattcagacttgtctttcagcaaggactggtctttctatctcttgtactacactgaattcacccccactgaaaaagatgagtatgcctgccgtgtgaaccatgtgactttgtcacagcccaagatagttaagtgggatcgagacatgtaa

SEQ ID NO: 393 - DNA, 186 bp, Homo sapiens
atgaagcgcttcctcttcctcctactcaccatcagcctcctggttatggtacagatacaaactggactctcaggacaaaacgacaccagccaaaccagcagcccctcagcatccagcaacataagcggaggcattttccttttcttcgtggccaatgccataatccacctcttctgcttcagttga

SEQ ID NO: 394 - DNA, 1508 bp, Homo sapiens
ttttgaaacccttcaaaggcagagacttgtccagcctaacctgcctgctgctcctagctcctgaggctcagggcccttggcttctgtccgctctgctcagggccctccagcgtggccactgctcagccatgctcctgctgctcgtcccagtgctcgaggtgatttttaccctgggaggaaccagagcccagtcggtgacccagcttggcagccacgtctctgtctctgaaggagccctggttctgctgaggtgcaactactcatcgtctgttccaccatatctcttctggtatgtgcaataccccaaccaaggactccagcttctcctgaagtacacatcagcggccaccctggttaaaggcatcaacggttttgaggctgaatttaagaagagtgaaacctccttccacctgacgaaaccctcagcccatatgagcgacgcggctgagtacttctgtgctgtgagtgatctcgaaccgaacagcagtgcttccaagataatctttggatcagggaccagactcagcatccggccaaatatccagaaccctgaccctgccgtgtaccagctgagagactctaaatccagtgacaagtctgtctgcctattcaccgattttgattctcaaacaaatgtgtcacaaagtaaggattctgatgtgtatatcacagacaaaactgtgctagacatgaggtctatggacttcaagagcaacagtgctgtggcctggagcaacaaatctgactttgcatgtgcaaacgccttcaacaacagcattattccagaagacaccttcttccccagcccagaaagttcctgtgatgtcaagctggtcgagaaaagctttgaaacagatacgaacctaaactttcaaaacctgtcagtgattgggttccgaatcctcctcctgaaagtggccgggtttaatctgctcatgacgctgcggctgtggtccagctgagatctgcaagattgtaagacagcctgtgctccctcgctccttcctctgcattgcccctcttctccctctccaaacagagggaactctcctacccccaaggaggtgaaagctgctaccacctctgtgcccccccggtaatgccaccaactggatcctacccgaatttatgattaagattgctgaagagctgccaaacactgctgccaccccctctgttcccttattgctgcttgtcactgcctgacattcacggcagaggcaaggctgctgcagcctcccctggctgtgcacattccctcctgctccccagagactgcctccgccatcccacagatgatggatcttcagtgggttctcttgggctctaggtcctggagaatgttgtgaggggtttatttttttttaatagtgttcataaagaaatacatagtattcttcttctcaagacgtggggggaaattatctcattatcgaggccctgctatgctgtgtgtctgggcgtgttgtatgtcctgctgccgatgccttcattaaaatgatttggaa

SEQ ID NO: 395 - DNA, 462 bp, Homo sapiens
atgagcatcagcctcctgtgctgtgcagcctttcctctcctgtgggcaggtccagtgaatgctggtggtgtcactcagaccccaaaattccgcatcctgaagataggacagagcatgacactgcagtgtgcccaggatatgaaccataactacatgtactggtatcgacaagacccaggcatggggctgaagctgatttattattcagttggtgctggtatcactgacaaaggagaagtcccgaatggatacaacgtctccagatcaaccacagaggatttcccgctcaggctggagttggctgctccctcccagacatctgtgtacttctgtgccagcagtaggggtggggccgggctcaatgagcagttcttcgggccagggacacggctcaccgtgctagaggacctgaaaaaggtgttcccacccgaggtcgctgtgtttgagccatcagaagcttcc

SEQ ID NO: 396 - DNA, 2690 bp, Homo sapiens
agtctagctgctgcacaggctggctggctggctggctgctaagggctgctccacgcttttgccggaggacagagactgacatggaacaggggaagggcctggctgtcctcatcctggctatcattcttcttcaaggtactttggcccagtcaatcaaaggaaaccacttggttaaggtgtatgactatcaagaagatggttcggtacttctgacttgtgatgcagaagccaaaaatatcacatggtttaaagatgggaagatgatcggcttcctaactgaagataaaaaaaaatggaatctgggaagtaatgccaaggaccctcgagggatgtatcagtgtaaaggatcacagaacaagtcaaaaccactccaagtgtattacagaatgtgtcagaactgcattgaactaaatgcagccaccatatctggctttctctttgctgaaatcgtcagcattttcgtccttgctgttggggtctacttcattgctggacaggatggagttcgccagtcgagagcttcagacaagcagactctgttgcccaatgaccagctctaccagcccctcaaggatcgagaagatgaccagtacagccaccttcaaggaaaccagttgaggaggaattgaactcaggactcagagtagtccaggtgttctcctcctattcagttcccagaatcaaagcaatgcattttggaaagctcctagcagagagactttcagccctaaatctagactcaaggttcccagagatgacaaatggagaagaaaggccatcagagcaaatttgggggtttctcaaataaaataaaaataaaaacaaatactgtgtttcagaagcgccacctattggggaaaattgtaaaagaaaaatgaaaagatcaaataaccccctggatttgaatataattttttgtgttgtaatttttatttcgtttttgtataggttataattcacatggctcaaatattcagtgaaagctctccctccaccgccatcccctgctacccagtgaccctgttgccctcttcagagacaaattagtttctcttttttttttttttttttttttttttgagacagtctggctctgtcacccaggctgaaatgcagtggcaccatctcggctcactgcaacctctgcctcctgggttcaagcgattctcctgcctcagcctcccgggcagctgggattacaggcacacactaccacacctggctaatttttgtatttttagtagagacagggttttgctctgttggccaagctggtctcgaactcctgacctcaagtgatccgcccgcctcagcctcccaaagtgctgggattacaggtgtgagccaccatgcctggtcttaaaaccagtttcttatatatctctctggaggtattctaggcatatatgagcacattctcaagtacatattatcctcccttcccctatcttttagacaaatgatatcaaactatacatcttgtgagattattgcataccattatatgaagataccattatatcctttttaatgcaaccatattgtacaaatagactatgatttatttaacctgttatctatcagtggatatttaagttggtagttggttccaatcttttgctcttacaacaattctgcaatgactaacattgtataaatatcatttttaaaaataattgcattgaagcataatgtacatgccataaaatccacccatcttaagtgatttcacctgttctcagaaatttttagtaaatttaactaattgtacagccattaccataatccagctttaggacattttcttttttttcttttcttttcttttttttcttttttttttttttttgaagtggaatcttgctctgtggcccaggctggagtgcagtggcgcgatctcagctcactgcaacctccacctcctgggttcaagcgattctcttgccttggcctcccgagtagctgagactacaggcacatgccaccacgcccagctcattttttgtgtatttagtatttgtgtatctagtatttgtgtacttagtagagacagggtttcaccatgttggccaggctggtctccaattcctgacctcaggcgatccacccgccttgacctcccaaagtgctgggattacaggtgtgagccaccgcgccaggcccgtaactgtattttaatatagccattctatggatttaatatggtattttattatggccttaatttgcatttccctagatactaaccatgctgagtgtcctgtcttgtgtttattaaccattcatatatttttagtgaaatgtgtatcaaatcttttgcccatttttaagttgacttatttgtttgtcttcttactattgggttgcatatgtttttgatataagtcctttatcagatatatgatttggaaatattttctaccaatctgtggtttgtttttcttaatggtgtcttttgaagtgcaaaaggtttgaattttgaagtacattttattgattttttcttctatatattgtgcttttggtatcatgtctaataaatctttaccaaacccacagttacaaagattttctcctgtcttctttttatactttttacagctttatggttttagctctaacaataaatgtgattttgaacatacataagactatttgtaacaaacacaaataaattgaattgttgggca

SEQ ID NO: 397 - DNA, 701 bp, Homo sapiens
ctttccggtacctgtgagtcagctaggggagggcagctctcacccaggctgatagttcggtgacctggctttatctactggatgagttccgctgggagatggaacatagcacgtttctctctggcctggtactggctacccttctctcgcaagtgagccccttcaagatacctatagaggaacttgaggacagagtgtttgtgaattgcaataccagcatcacatgggtagagggaacggtgggaacactgctctcagacattacaagactggacctgggaaaacgcatcctggacccacgaggaatatataggtgtaatgggacagatatatacaaggacaaagaatctaccgtgcaagttcattatcgaatgtgccagagctgtgtggagctggatccagccaccgtggctggcatcattgtcactgatgtcattgccactctgctccttgctttgggagtcttctgctttgctggacatgagactggaaggctgtctggggctgccgacacacaagctctgttgaggaatgaccaggtctatcagcccctccgagatcgagatgatgctcagtacagccaccttggaggaaactgggctcggaacaagtgaacctgagactggtggcttctagaagcagccattaccaactgtaccttcccttcttgctcagccaataaatatatcctctttcactca

SEQ ID NO: 398 - DNA, 1361 bp, Homo sapiens
agaaaccctcctcccctcccagcctcaggtgcctgcttcagaaaatgaagtagtaagtctgctggcctccgccatcttagtaaagtaacagtcccatgaaacaaagatgcagtcgggcactcactggagagttctgggcctctgcctcttatcagttggcgtttgggggcaagatggtaatgaagaaatgggtggtattacacagacaccatataaagtctccatctctggaaccacagtaatattgacatgccctcagtatcctggatctgaaatactatggcaacacaatgataaaaacataggcggtgatgaggatgataaaaacataggcagtgatgaggatcacctgtcactgaaggaattttcagaattggagcaaagtggttattatgtctgctaccccagaggaagcaaaccagaagatgcgaacttttatctctacctgagggcaagagtgtgtgagaactgcatggagatggatgtgatgtcggtggccacaattgtcatagtggacatctgcatcactgggggcttgctgctgctggtttactactggagcaagaatagaaaggccaaggccaagcctgtgacacgaggagcgggtgctggcggcaggcaaaggggacaaaacaaggagaggccaccacctgttcccaacccagactatgagcccatccggaaaggccagcgggacctgtattctggcctgaatcagagacgcatctgaccctctggagaacactgcctcccgctggcccaggtctcctctccagtccccctgcgactccctgtttcctgggctagtcttggaccccacgagagagaatcgttcctcagcctcatggtgaactcgcgccctccagcctgatcccccgctccctcctccctgccttctctgctggtacccagtcctaaaatattgctgcttcctcttcctttgaagcatcatcagtagtcacaccctcacagctggcctgccctcttgccaggatatttatttgtgctattcactcccttccctttggatgtaacttctccgttcagttccctccttttcttgcatgtaagttgtcccccatcccaaagtattccatctacttttctatcgccgtccccttttgcagccctctctggggatggactgggtaaatgttgacagaggccctgccccgttcacagatcctggccctgagccagccctgtgctcctccctcccccaacactccctaccaaccccctaatcccctactccctccaccccccctccactgtaggccactggatggtcatttgcatctccgtaaatgtgctctgctcctcagctgagagagaaaaaaataaactgtatttggctgcaa

SEQ ID NO: 399 - DNA, 1597 bp, Homo sapiens
aaccgtcccggccaccgctgcctcagcctctgcctcccagcctctttctgagggaaaggacaagatgaagtggaaggcgcttttcaccgcggccatcctgcaggcacagttgccgattacagaggcacagagctttggcctgctggatcccaaactctgctacctgctggatggaatcctcttcatctatggtgtcattctcactgccttgttcctgagagtgaagttcagcaggagcgcagacgcccccgcgtaccagcagggccagaaccagctctataacgagctcaatctaggacgaagagaggagtacgatgttttggacaagagacgtggccgggaccctgagatggggggaaagccgagaaggaagaaccctcaggaaggcctgtacaatgaactgcagaaagataagatggcggaggcctacagtgagattgggatgaaaggcgagcgccggaggggcaaggggcacgatggcctttaccagggtctcagtacagccaccaaggacacctacgacgcccttcacatgcaggccctgccccctcgctaacagccaggggatttcaccactcaaaggccagacctgcagacgcccagattatgagacacaggatgaagcatttacaacccggttcactcttctcagccactgaagtattcccctttatgtacaggatgctttggttatatttagctccaaaccttcacacacagactgttgtccctgcactctttaagggagtgtactcccagggcttacggccctggccttgggccctctggtttgccggtggtgcaggtagacctgtctcctggcggttcctcgttctccctgggaggcgggcgcactgcctctcacagctgagttgttgagtctgttttgtaaagtccccagagaaagcgcagatgctagcacatgccctaatgtctgtatcactctgtgtctgagtggcttcactcctgctgtaaatttggcttctgttgtcaccttcacctcctttcaaggtaactgtactgggccatgttgtgcctccctggtgagagggccgggcagaggggcagatggaaaggagcctaggccaggtgcaaccagggagctgcaggggcatgggaaggtgggcgggcaggggagggtcagccagggcctgcgagggcagcgggagcctccctgcctcaggcctctgtgccgcaccattgaactgtaccatgtgctacaggggccagaagatgaacagactgaccttgatgagctgtgcacaaagtggcataaaaaacatgtggttacacagtgtgaataaagtgctgcggagcaagaggaggccgttgattcacttcacgctttcagcgaatgacaaaatcatctttgtgaaggcctcgcaggaagacccaacacatgggacctataactgcccagcggacagtggcaggacaggaaaaacccgtcaatgtactaggatactgctgcgtcattacagggcacaggccatggatggaaaacgctctctactctgctttttttctactgttttaatttatactggcatgctaaagccttcctattttgcataataaatgcttcagtgaaaatgca

SEQ ID NO: 400 - DNA, 21 bp, Homo Sapiens
cttcttccttccctattaaaa

SEQ ID NO: 401 - DNA, 21 bp, Homo Sapiens
tctcactccatgaggtatttc

SEQ ID NO: 402 - DNA, 21 bp, Homo Sapiens
ctctcactccatgaggtattt

SEQ ID NO: 403 - DNA, 21 bp, Homo Sapiens
gaggaggaagagctcagatag

SEQ ID NO: 404 - DNA, 21 bp, Homo Sapiens
gctctcactccatgaggtatt

SEQ ID NO: 405 - DNA, 21 bp, Homo Sapiens
aggattacatcgccctgaaag

SEQ ID NO: 406 - DNA, 21 bp, Homo Sapiens
acaccgtccagaggatgtatg

SEQ ID NO: 407 - DNA, 21 bp, Homo Sapiens
agggtccttcttcctggatac

SEQ ID NO: 408 - DNA, 21 bp, Homo Sapiens
cctacgacggcaaggattaca

SEQ ID NO: 409 - DNA, 21 bp, Homo Sapiens
tcactccatgaggtatttctt

SEQ ID NO: 410 - DNA, 21 bp, Homo Sapiens
ctacgacggcaaggattacat

SEQ ID NO: 411 - DNA, 21 bp, Homo Sapiens
ctcactccatgaggtatttct

SEQ ID NO: 412 - DNA, 21 bp, Homo Sapiens
ggaggaagagctcagatagaa

SEQ ID NO: 413 - DNA, 21 bp, Homo Sapiens
cacaccgtccagaggatgtat

SEQ ID NO: 414 - DNA, 21 bp, Homo Sapiens
cacgctgtctctgaccatgaa

SEQ ID NO: 415 - DNA, 21 bp, Homo Sapiens
ctggacaggagcagagataca

SEQ ID NO: 416 - DNA, 21 bp, Homo Sapiens
tggaggaggaagagctcagat

SEQ ID NO: 417 - DNA, 21 bp, Homo Sapiens
ggctctcactccatgaggtat

SEQ ID NO: 418 - DNA, 21 bp, Homo Sapiens
catctctgtctcaacttcatg

SEQ ID NO: 419 - DNA, 21 bp, Homo Sapiens
tacgacggcaaggattacatc

SEQ ID NO: 420 - DNA, 21 bp, Homo Sapiens
ggattacatcgccctgaaaga

SEQ ID NO: 421 - DNA, 21 bp, Homo Sapiens
gattacatcgccctgaaagag

SEQ ID NO: 422 - DNA, 21 bp, Homo Sapiens
ctcagaccaccaagcacaagt

SEQ ID NO: 423 - DNA, 21 bp, Homo Sapiens
tcacaccgtccagaggatgta

SEQ ID NO: 424 - DNA, 21 bp, Homo Sapiens
actccatgaggtatttcttca

SEQ ID NO: 425 - DNA, 21 bp, Homo Sapiens
cactccatgaggtatttcttc

SEQ ID NO: 426 - DNA, 21 bp, Homo Sapiens
ccatgaggtatttcttcacat

SEQ ID NO: 427 - DNA, 21 bp, Homo Sapiens
acttcttccttccctattaaa

SEQ ID NO: 428 - DNA, 21 bp, Homo Sapiens
gtgtctctcacagcttgtaaa

SEQ ID NO: 429 - DNA, 21 bp, Homo Sapiens
ctgtgttcgtgtaggcataat

SEQ ID NO: 430 - DNA, 21 bp, Homo Sapiens
tgtgttcgtgtaggcataatg

SEQ ID NO: 431 - DNA, 21 bp, Homo Sapiens
taacttcttccttccctatta

SEQ ID NO: 432 - DNA, 21 bp, Homo Sapiens
tctggacaggagcagagatac

SEQ ID NO: 433 - DNA, 21 bp, Homo Sapiens
ttgctggcctggttctctttg

SEQ ID NO: 434 - DNA, 21 bp, Homo Sapiens
tgtctctcacagcttgtaaag

SEQ ID NO: 435 - DNA, 21 bp, Homo Sapiens
acttgaagaaccctgactttg

SEQ ID NO: 436 - DNA, 21 bp, Homo Sapiens
gaagaaccctgactttgtttc

SEQ ID NO: 437 - DNA, 21 bp, Homo Sapiens
tctgtgttcgtgtaggcataa

SEQ ID NO: 438 - DNA, 21 bp, Homo Sapiens
catggtgcactgagctgtaac

SEQ ID NO: 439 - DNA, 21 bp, Homo Sapiens
gtaacttcttccttccctatt

SEQ ID NO: 440 - DNA, 21 bp, Homo Sapiens
catgtgcagcatgagggtttg

SEQ ID NO: 441 - DNA, 21 bp, Homo Sapiens
ttgttcctgcccttccctttg

SEQ ID NO: 442 - DNA, 21 bp, Homo Sapiens
acccagttctcactcccattg

SEQ ID NO: 443 - DNA, 21 bp, Homo Sapiens
gggtttccagagaagccaatc

SEQ ID NO: 444 - DNA, 21 bp, Homo Sapiens
ttctccctctcccaacctatg

SEQ ID NO: 445 - DNA, 21 bp, Homo Sapiens
gtctctcacagcttgtaaagt

SEQ ID NO: 446 - DNA, 21 bp, Homo Sapiens
tgtgtctctcacagcttgtaa

SEQ ID NO: 447 - DNA, 21 bp, Homo Sapiens
gaggaagagctcagatagaaa

SEQ ID NO: 448 - DNA, 21 bp, Homo Sapiens
tgaagaaccctgactttgttt

SEQ ID NO: 449 - DNA, 21 bp, Homo Sapiens
ttgaagaaccctgactttgtt

SEQ ID NO: 450 - DNA, 21 bp, Homo Sapiens
gtgttcgtgtaggcataatgt

SEQ ID NO: 451 - DNA, 21 bp, Homo Sapiens
tggtgcactgagctgtaactt

SEQ ID NO: 452 - DNA, 21 bp, Homo Sapiens
ctccctctcccaacctatgta

SEQ ID NO: 453 - DNA, 21 bp, Homo Sapiens
aggaggaagagctcagataga

SEQ ID NO: 454 - DNA, 21 bp, Homo Sapiens
acctatgtagggtccttcttc

SEQ ID NO: 455 - DNA, 21 bp, Homo Sapiens
gggtccttcttcctggatact

SEQ ID NO: 456 - DNA, 21 bp, Homo Sapiens
ggtccttcttcctggatactc

SEQ ID NO: 457 - DNA, 21 bp, Homo Sapiens
gtccttcttcctggatactca

SEQ ID NO: 458 - DNA, 21 bp, Homo Sapiens
aagccaatcagtgtcgtcgcg

SEQ ID NO: 459 - DNA, 21 bp, Homo Sapiens
aagaggacctgcgctcttgga

SEQ ID NO: 460 - DNA, 21 bp, Homo Sapiens
aagtgtgagacagctgccttg

SEQ ID NO: 461 - DNA, 21 bp, Homo Sapiens
aaggcacctgcatgtgtctgt

SEQ ID NO: 462 - DNA, 21 bp, Homo Sapiens
aatcatctttcctgttccaga

SEQ ID NO: 463 - DNA, 21 bp, Homo Sapiens
aaaggcacctgcatgtgtctg

SEQ ID NO: 464 - DNA, 21 bp, Homo Sapiens
aaagaggacctgcgctcttgg

SEQ ID NO: 465 - DNA, 21 bp, Homo Sapiens
aaacgcatatgactcaccacg

SEQ ID NO: 466 - DNA, 19 bp, Homo Sapiens
ggaagagctcagatagaaa

SEQ ID NO: 467 - DNA, 19 bp, Homo Sapiens
gggagacacggaaagtgaa

SEQ ID NO: 468 - DNA, 21 bp, Homo Sapiens
cacctgccatgtgcagcatga

SEQ ID NO: 469 - DNA, 21 bp, Homo Sapiens
ggagatcacactgacctggca

SEQ ID NO: 470 - DNA, 20 bp, Homo Sapiens
ggattacatcgccctgaaag

SEQ ID NO: 471 - DNA, 20 bp, Homo Sapiens
gcaggagggtccggagtatt

SEQ ID NO: 472 - DNA, 20 bp, Homo Sapiens
ggacggggagacacggaaag

SEQ ID NO: 473 - DNA, 19 bp, Homo Sapiens
gaaagtgaaggcccactca

SEQ ID NO: 474 - DNA, 20 bp, Homo Sapiens
gatacctggagaacgggaag

SEQ ID NO: 475 - DNA, 20 bp, Homo Sapiens
gctgtggtggtgccttctgg

SEQ ID NO: 476 - DNA, 20 bp, Homo Sapiens
gctactacaaccagagcgag

SEQ ID NO: 477 - DNA, 19 bp, Homo Sapiens
gtggctccgcagatacctg

SEQ ID NO: 478 - DNA, 19 bp, Homo Sapiens
gccaatcagtgtcgtcgcg

SEQ ID NO: 479 - DNA, 19 bp, Homo Sapiens
gaggacctgcgctcttgga

SEQ ID NO: 480 - DNA, 19 bp, Homo Sapiens
gtgtgagacagctgccttg

SEQ ID NO: 481 - DNA, 19 bp, Homo Sapiens
ggcacctgcatgtgtctgt

SEQ ID NO: 482 - DNA, 19 bp, Homo Sapiens
tcatctttcctgttccaga

SEQ ID NO: 483 - DNA, 19 bp, Homo Sapiens
aggcacctgcatgtgtctg

SEQ ID NO: 484 - DNA, 19 bp, Homo Sapiens
agaggacctgcgctcttgg

SEQ ID NO: 485 - DNA, 19 bp, Homo Sapiens
acgcatatgactcaccacg

SEQ ID NO: 486 - DNA, 21 bp, Homo Sapiens
cttctggacaggagcagagat

SEQ ID NO: 487 - DNA, 21 bp, Homo Sapiens
gggatggaaccttccagaagt

SEQ ID NO: 488 - DNA, 21 bp, Homo Sapiens
tggacaggagcagagatacac

SEQ ID NO: 489 - DNA, 21 bp, Homo Sapiens
acgctgtctctgaccatgaag

SEQ ID NO: 490 - DNA, 21 bp, Homo Sapiens
ttctggacaggagcagagata

SEQ ID NO: 491 - DNA, 21 bp, Homo Sapiens
ggttctctttggagctgtgat

SEQ ID NO: 492 - DNA, 21 bp, Homo Sapiens
cattgctggcctggttctctt

SEQ ID NO: 493 - DNA, 21 bp, Homo Sapiens
ttctctttggagctgtgatca

SEQ ID NO: 494 - DNA, 21 bp, Homo Sapiens
attgctggcctggttctcttt

SEQ ID NO: 495 - DNA, 21 bp, Homo Sapiens
atgtgtctctcacagcttgta

SEQ ID NO: 496 - DNA, 21 bp, Homo Sapiens
ccctgactttgtttctgcaaa

SEQ ID NO: 497 - DNA, 21 bp, Homo Sapiens
gcacctgcatgtgtctgtgtt

SEQ ID NO: 498 - DNA, 21 bp, Homo Sapiens
gcccttccctttgtgacttga

SEQ ID NO: 499 - DNA, 21 bp, Homo Sapiens
agaaccctgactttgtttctg

SEQ ID NO: 500 - DNA, 21 bp, Homo Sapiens
tccatctctgtctcaacttca

SEQ ID NO: 501 - DNA, 21 bp, Homo Sapiens
gtgcactgagctgtaacttct

SEQ ID NO: 502 - DNA, 21 bp, Homo Sapiens
ctgcccttccctttgtgactt

SEQ ID NO: 503 - DNA, 21 bp, Homo Sapiens
tgacttgaagaaccctgactt

SEQ ID NO: 504 - DNA, 21 bp, Homo Sapiens
gtgtctccatctctgtctcaa

SEQ ID NO: 505 - DNA, 21 bp, Homo Sapiens
tgcactgagctgtaacttctt

SEQ ID NO: 506 - DNA, 21 bp, Homo Sapiens
tgttcctgcccttccctttgt

SEQ ID NO: 507 - DNA, 21 bp, Homo Sapiens
gacttgaagaaccctgacttt

SEQ ID NO: 508 - DNA, 21 bp, Homo Sapiens
tctctcacagcttgtaaagtg

SEQ ID NO: 509 - DNA, 21 bp, Homo Sapiens
ggaggaggaagagctcagata

SEQ ID NO: 510 - DNA, 21 bp, Homo Sapiens
ggactgagaggcaagagttgt

SEQ ID NO: 511 - DNA, 21 bp, Homo Sapiens
actgagaggcaagagttgttc

SEQ ID NO: 512 - DNA, 21 bp, Homo Sapiens
tgggactgagaggcaagagtt

SEQ ID NO: 513 - DNA, 21 bp, Homo Sapiens
gactgagaggcaagagttgtt

SEQ ID NO: 514 - DNA, 21 bp, Homo Sapiens
cccttccctttgtgacttgaa

SEQ ID NO: 515 - DNA, 21 bp, Homo Sapiens
gtttccagagaagccaatcag

SEQ ID NO: 516 - DNA, 21 bp, Homo Sapiens
ggtttccagagaagccaatca

SEQ ID NO: 517 - DNA, 21 bp, Homo Sapiens
ccttccctttgtgacttgaag

SEQ ID NO: 518 - DNA, 21 bp, Homo Sapiens
tccctttgtgacttgaagaac

SEQ ID NO: 519 - DNA, 21 bp, Homo Sapiens
ttccctttgtgacttgaagaa

SEQ ID NO: 520 - DNA, 21 bp, Homo Sapiens
cttccctttgtgacttgaaga

SEQ ID NO: 521 - DNA, 21 bp, Homo Sapiens
cttgaagaaccctgactttgt

SEQ ID NO: 522 - DNA, 21 bp, Homo Sapiens
gcactgagctgtaacttcttc

SEQ ID NO: 523 - DNA, 21 bp, Homo Sapiens
tgttcgtgtaggcataatgtg

SEQ ID NO: 524 - DNA, 21 bp, Homo Sapiens
ccatctctgtctcaacttcat

SEQ ID NO: 525 - DNA, 21 bp, Homo Sapiens
tcatggtgcactgagctgtaa

SEQ ID NO: 526 - DNA, 21 bp, Homo Sapiens
gtctccatctctgtctcaact

SEQ ID NO: 527 - DNA, 21 bp, Homo Sapiens
tctccatctctgtctcaactt

SEQ ID NO: 528 - DNA, 21 bp, Homo Sapiens
ctccatctctgtctcaacttc

SEQ ID NO: 529 - DNA, 21 bp, Homo Sapiens
atggtgcactgagctgtaact

SEQ ID NO: 530 - DNA, 21 bp, Homo Sapiens
ggtgcactgagctgtaacttc

SEQ ID NO: 531 - DNA, 21 bp, Homo Sapiens
tagggtccttcttcctggata

SEQ ID NO: 532 - DNA, 21 bp, Homo Sapiens
tctccctctcccaacctatgt

SEQ ID NO: 533 - DNA, 21 bp, Homo Sapiens
tccctctcccaacctatgtag

SEQ ID NO: 534 - DNA, 21 bp, Homo Sapiens
tttctccctctcccaacctat

SEQ ID NO: 535 - DNA, 21 bp, Homo Sapiens
agcaggagggtccggagtatt

SEQ ID NO: 536 - DNA, 21 bp, Homo Sapiens
gctctgatgtgtctctcacag

SEQ ID NO: 537 - DNA, 21 bp, Homo Sapiens
caaggattacatcgccctgaa

SEQ ID NO: 538 - DNA, 21 bp, Homo Sapiens
agcttgtaaagtgtgagacag

SEQ ID NO: 539 - DNA, 21 bp, Homo Sapiens
acgacggcaaggattacatcg

SEQ ID NO: 540 - DNA, 21 bp, Homo Sapiens
tcagaccaccaagcacaagtg

SEQ ID NO: 541 - DNA, 21 bp, Homo Sapiens
agctcagaccaccaagcacaa

SEQ ID NO: 542 - DNA, 21 bp, Homo Sapiens
cagagatacacctgccatgtg

SEQ ID NO: 543 - DNA, 21 bp, Homo Sapiens
atgaggtatttcttcacatcc

SEQ ID NO: 544 - DNA, 21 bp, Homo Sapiens
ctccatgaggtatttcttcac

SEQ ID NO: 545 - DNA, 21 bp, Homo Sapiens
cactgagctgtaacttcttcc

SEQ ID NO: 546 - DNA, 21 bp, Homo Sapiens
cctatgtagggtccttcttcc

SEQ ID NO: 547 - DNA, 21 bp, Homo Sapiens
catgaggtatttcttcacatc

SEQ ID NO: 548 - DNA, 21 bp, Homo Sapiens
catctttcctgttccagagag

SEQ ID NO: 549 - DNA, 21 bp, Homo Sapiens
tcaacttcatggtgcactgag

SEQ ID NO: 550 - DNA, 21 bp, Homo Sapiens
ggatggaaccttccagaagtg

SEQ ID NO: 551 - DNA, 21 bp, Homo Sapiens
gcagagatacacctgccatgt

SEQ ID NO: 552 - DNA, 21 bp, Homo Sapiens
ccatgtgcagcatgagggttt

SEQ ID NO: 553 - DNA, 21 bp, Homo Sapiens
tatgactcaccacgctgtctc

SEQ ID NO: 554 - DNA, 21 bp, Homo Sapiens
aggtgtctccatctctgtctc

SEQ ID NO: 555 - DNA, 21 bp, Homo Sapiens
atgtgcagcatgagggtttgc

SEQ ID NO: 556 - DNA, 21 bp, Homo Sapiens
tgtgatgtggaggaggaagag

SEQ ID NO: 557 - DNA, 21 bp, Homo Sapiens
catcattgctggcctggttct

SEQ ID NO: 558 - DNA, 21 bp, Homo Sapiens
atcattgctggcctggttctc

SEQ ID NO: 559 - DNA, 21 bp, Homo Sapiens
ttcatggtgcactgagctgta

SEQ ID NO: 560 - DNA, 21 bp, Homo Sapiens
ctgtgatgtggaggaggaaga

SEQ ID NO: 561 - DNA, 21 bp, Homo Sapiens
tctctttggagctgtgatcac

SEQ ID NO: 562 - DNA, 21 bp, Homo Sapiens
gttctctttggagctgtgatc

SEQ ID NO: 563 - DNA, 21 bp, Homo Sapiens
tctttggagctgtgatcactg

SEQ ID NO: 564 - DNA, 21 bp, Homo Sapiens
tgatgtgtctctcacagcttg

SEQ ID NO: 565 - DNA, 21 bp, Homo Sapiens
gatgtgtctctcacagcttgt

SEQ ID NO: 566 - DNA, 21 bp, Homo Sapiens
acagcttgtaaagtgtgagac

SEQ ID NO: 567 - DNA, 21 bp, Homo Sapiens
agtgtgagacagctgccttgt

SEQ ID NO: 568 - DNA, 21 bp, Homo Sapiens
atctctgtctcaacttcatgg

SEQ ID NO: 569 - DNA, 21 bp, Homo Sapiens
catgtccaccatgaccctctt

SEQ ID NO: 570 - DNA, 21 bp, Homo Sapiens
cccaatcatctttcctgttcc

SEQ ID NO: 571 - DNA, 21 bp, Homo Sapiens
gttgttcctgcccttcccttt

SEQ ID NO: 572 - DNA, 21 bp, Homo Sapiens
atgtccaccatgaccctcttc

SEQ ID NO: 573 - DNA, 21 bp, Homo Sapiens
tctcacagcttgtaaagtgtg

SEQ ID NO: 574 - DNA, 21 bp, Homo Sapiens
ctgagaggcaagagttgttcc

SEQ ID NO: 575 - DNA, 21 bp, Homo Sapiens
tgcccttccctttgtgacttg

SEQ ID NO: 576 - DNA, 21 bp, Homo Sapiens
gacccagttctcactcccatt

SEQ ID NO: 577 - DNA, 21 bp, Homo Sapiens
cacctgcatgtgtctgtgttc

SEQ ID NO: 578 - DNA, 21 bp, Homo Sapiens
tgaggtgtctccatctctgtc

SEQ ID NO: 579 - DNA, 21 bp, Homo Sapiens
tgtctccatctctgtctcaac

SEQ ID NO: 580 - DNA, 21 bp, Homo Sapiens
ccaacctatgtagggtccttc

SEQ ID NO: 581 - DNA, 21 bp, Homo Sapiens
caacctatgtagggtccttct

SEQ ID NO: 582 - DNA, 21 bp, Homo Sapiens
ttccagagaagccaatcagtg

SEQ ID NO: 583 - DNA, 21 bp, Homo Sapiens
ccagagaagccaatcagtgtc

SEQ ID NO: 584 - DNA, 21 bp, Homo Sapiens
cgggtttccagagaagccaat

SEQ ID NO: 585 - DNA, 21 bp, Homo Sapiens
ccctttgtgacttgaagaacc

SEQ ID NO: 586 - DNA, 21 bp, Homo Sapiens
tctgcaaaggcacctgcatgt

SEQ ID NO: 587 - DNA, 21 bp, Homo Sapiens
ttcgtgtaggcataatgtgag

SEQ ID NO: 588 - DNA, 21 bp, Homo Sapiens
ttctgcaaaggcacctgcatg

SEQ ID NO: 589 - DNA, 21 bp, Homo Sapiens
acctgcatgtgtctgtgttcg

SEQ ID NO: 590 - DNA, 21 bp, Homo Sapiens
gtctgtgttcgtgtaggcata

SEQ ID NO: 591 - DNA, 21 bp, Homo Sapiens
gcatgtgtctgtgttcgtgta

SEQ ID NO: 592 - DNA, 21 bp, Homo Sapiens
catgtgtctgtgttcgtgtag

SEQ ID NO: 593 - DNA, 21 bp, Homo Sapiens
atgtgtctgtgttcgtgtagg

SEQ ID NO: 594 - DNA, 21 bp, Homo Sapiens
tgtaacttcttccttccctat

SEQ ID NO: 595 - DNA, 21 bp, Homo Sapiens
tgagctgtaacttcttccttc

SEQ ID NO: 596 - DNA, 21 bp, Homo Sapiens
tccttcttcctggatactcac

SEQ ID NO: 597 - DNA, 21 bp, Homo Sapiens
gcctacgacggcaaggattac

SEQ ID NO: 598 - DNA, 21 bp, Homo Sapiens
cgcctacgacggcaaggatta

SEQ ID NO: 599 - DNA, 21 bp, Homo Sapiens
tcattgctggcctggttctct

SEQ ID NO: 600 - DNA, 21 bp, Homo Sapiens
ctgagctgtaacttcttcctt

SEQ ID NO: 601 - DNA, 21 bp, Homo Sapiens
ctctcacagcttgtaaagtgt

SEQ ID NO: 602 - DNA, 21 bp, Homo Sapiens
tgcaaaggcacctgcatgtgt

SEQ ID NO: 603 - DNA, 21 bp, Homo Sapiens
tccatgaggtatttcttcaca

SEQ ID NO: 604 - DNA, 21 bp, Homo Sapiens
ttctaccctgcggagatcaca

SEQ ID NO: 605 - DNA, 21 bp, Homo Sapiens
ctctttggagctgtgatcact

SEQ ID NO: 606 - DNA, 21 bp, Homo Sapiens
gttcgtgtaggcataatgtga

SEQ ID NO: 607 - DNA, 21 bp, Homo Sapiens
tgtgagacagctgccttgtgt

SEQ ID NO: 608 - DNA, 21 bp, Homo Sapiens
ttcctgcccttccctttgtga

SEQ ID NO: 609 - DNA, 21 bp, Homo Sapiens
tttccagagaagccaatcagt

SEQ ID NO: 610 - DNA, 21 bp, Homo Sapiens
ttctcacaccgtccagaggat

SEQ ID NO: 611 - DNA, 21 bp, Homo Sapiens
ggctctgatgtgtctctcaca

SEQ ID NO: 612 - DNA, 21 bp, Homo Sapiens
tcatctttcctgttccagaga

SEQ ID NO: 613 - DNA, 21 bp, Homo Sapiens
gtagggtccttcttcctggat

SEQ ID NO: 614 - DNA, 21 bp, Homo Sapiens
gaaagtgaaggcccactcaca

SEQ ID NO: 615 - DNA, 21 bp, Homo Sapiens
atacctggagaacgggaagga

SEQ ID NO: 616 - DNA, 21 bp, Homo Sapiens
tgcatgtgtctgtgttcgtgt

SEQ ID NO: 617 - DNA, 21 bp, Homo Sapiens
ctgcatgtgtctgtgttcgtg

SEQ ID NO: 618 - DNA, 21 bp, Homo Sapiens
cttgtaaagtgtgagacagct

SEQ ID NO: 619 - DNA, 21 bp, Homo Sapiens
tatgtagggtccttcttcctg

SEQ ID NO: 620 - DNA, 21 bp, Homo Sapiens
ttacatcgccctgaaagagga

SEQ ID NO: 621 - DNA, 21 bp, Homo Sapiens
attacatcgccctgaaagagg

SEQ ID NO: 622 - DNA, 21 bp, Homo Sapiens
agagatacacctgccatgtgc

SEQ ID NO: 623 - DNA, 21 bp, Homo Sapiens
gacaggagcagagatacacct

SEQ ID NO: 624 - DNA, 21 bp, Homo Sapiens
tgctgtgatgtggaggaggaa

SEQ ID NO: 625 - DNA, 21 bp, Homo Sapiens
tacacctgccatgtgcagcat

SEQ ID NO: 626 - DNA, 21 bp, Homo Sapiens
atgtggaggaggaagagctca

SEQ ID NO: 627 - DNA, 21 bp, Homo Sapiens
gatggaaccttccagaagtgg

SEQ ID NO: 628 - DNA, 21 bp, Homo Sapiens
gagatacacctgccatgtgca

SEQ ID NO: 629 - DNA, 21 bp, Homo Sapiens
attgggtgtcgggtttccaga

SEQ ID NO: 630 - DNA, 21 bp, Homo Sapiens
tgtgatcactggagctgtggt

SEQ ID NO: 631 - DNA, 21 bp, Homo Sapiens
atgactcaccacgctgtctct

SEQ ID NO: 632 - DNA, 21 bp, Homo Sapiens
ggtgtctccatctctgtctca

SEQ ID NO: 633 - DNA, 21 bp, Homo Sapiens
tggttctctttggagctgtga

SEQ ID NO: 634 - DNA, 21 bp, Homo Sapiens
tcgggtttccagagaagccaa

SEQ ID NO: 635 - DNA, 21 bp, Homo Sapiens
tttctgcaaaggcacctgcat

SEQ ID NO: 636 - DNA, 21 bp, Homo Sapiens
ctgaggtgtctccatctctgt

SEQ ID NO: 637 - DNA, 21 bp, Homo Sapiens
gagcagagatacacctgccat

SEQ ID NO: 638 - DNA, 21 bp, Homo Sapiens
atatgactcaccacgctgtct

SEQ ID NO: 639 - DNA, 21 bp, Homo Sapiens
gtgacttgaagaaccctgact

SEQ ID NO: 640 - DNA, 21 bp, Homo Sapiens
actgagctgtaacttcttcct

SEQ ID NO: 641 - DNA, 21 bp, Homo Sapiens
ctatgtagggtccttcttcct

SEQ ID NO: 642 - DNA, 21 bp, Homo Sapiens
tctctgtctcaacttcatggt

SEQ ID NO: 643 - DNA, 21 bp, Homo Sapiens
agctgtgatcactggagctgt

SEQ ID NO: 644 - DNA, 21 bp, Homo Sapiens
cctggttctctttggagctgt

SEQ ID NO: 645 - DNA, 21 bp, Homo Sapiens
cttcatggtgcactgagctgt

SEQ ID NO: 646 - DNA, 21 bp, Homo Sapiens
tgatgtggaggaggaagagct

SEQ ID NO: 647 - DNA, 21 bp, Homo Sapiens
tttggagctgtgatcactgga

SEQ ID NO: 648 - DNA, 21 bp, Homo Sapiens
tctgatgtgtctctcacagct

SEQ ID NO: 649 - DNA, 21 bp, Homo Sapiens
ctgatgtgtctctcacagctt

SEQ ID NO: 650 - DNA, 21 bp, Homo Sapiens
caaaggcacctgcatgtgtct

SEQ ID NO: 651 - DNA, 21 bp, Homo Sapiens
agggctctgatgtgtctctca

SEQ ID NO: 652 - DNA, 21 bp, Homo Sapiens
tctttcctgttccagagaggt

SEQ ID NO: 653 - DNA, 21 bp, Homo Sapiens
gaaccctgactttgtttctgc

SEQ ID NO: 654 - DNA, 21 bp, Homo Sapiens
gagaggcaagagttgttcctg

SEQ ID NO: 655 - DNA, 21 bp, Homo Sapiens
caatcatctttcctgttccag

SEQ ID NO: 656 - DNA, 21 bp, Homo Sapiens
cccaacctatgtagggtcctt

SEQ ID NO: 657 - DNA, 21 bp, Homo Sapiens
tgagaggcaagagttgttcct

SEQ ID NO: 658 - DNA, 21 bp, Homo Sapiens
agttgttcctgcccttccctt

SEQ ID NO: 659 - DNA, 21 bp, Homo Sapiens
accctgactttgtttctgcaa

SEQ ID NO: 660 - DNA, 21 bp, Homo Sapiens
ccaatcatctttcctgttcca

SEQ ID NO: 661 - DNA, 21 bp, Homo Sapiens
ctgtaacttcttccttcccta

SEQ ID NO: 662 - DNA, 21 bp, Homo Sapiens
tactctcaggctgcaagcagt

SEQ ID NO: 663 - DNA, 21 bp, Homo Sapiens
cagcttgtaaagtgtgagaca

SEQ ID NO: 664 - DNA, 21 bp, Homo Sapiens
cacagcttgtaaagtgtgaga

SEQ ID NO: 665 - DNA, 21 bp, Homo Sapiens
ttgtgtgggactgagaggcaa

SEQ ID NO: 666 - DNA, 21 bp, Homo Sapiens
tccagagaagccaatcagtgt

SEQ ID NO: 667 - DNA, 21 bp, Homo Sapiens
agagaagccaatcagtgtcgt

SEQ ID NO: 668 - DNA, 21 bp, Homo Sapiens
cgtgtaggcataatgtgagga

SEQ ID NO: 669 - DNA, 21 bp, Homo Sapiens
cctgcatgtgtctgtgttcgt

SEQ ID NO: 670 - DNA, 21 bp, Homo Sapiens
tgtctgtgttcgtgtaggcat

SEQ ID NO: 671 - DNA, 21 bp, Homo Sapiens
ctcaacttcatggtgcactga

SEQ ID NO: 672 - DNA, 21 bp, Homo Sapiens
ctctgtctcaacttcatggtg

SEQ ID NO: 673 - DNA, 21 bp, Homo Sapiens
gtctcaacttcatggtgcact

SEQ ID NO: 674 - DNA, 21 bp, Homo Sapiens
gaggtgtctccatctctgtct

SEQ ID NO: 675 - DNA, 21 bp, Homo Sapiens
cttcttcctggatactcacga

SEQ ID NO: 676 - DNA, 21 bp, Homo Sapiens
agatacctggagaacgggaag

SEQ ID NO: 677 - DNA, 21 bp, Homo Sapiens
gtatttcttcacatccgtgtc

SEQ ID NO: 678 - DNA, 21 bp, Homo Sapiens
ttctcactcccattgggtgtc

SEQ ID NO: 679 - DNA, 18 bp, Homo Sapiens
cgaaggcggtgtatggat

SEQ ID NO: 680 - DNA, 18 bp, Homo Sapiens
gaaggcggtgtatggatt

SEQ ID NO: 681 - DNA, 18 bp, Homo Sapiens
aaggcggtgtatggattg

SEQ ID NO: 682 - DNA, 18 bp, Homo Sapiens
aggcggtgtatggattgg

SEQ ID NO: 683 - DNA, 18 bp, Homo Sapiens
cccaactccgcagtttct

SEQ ID NO: 684 - DNA, 18 bp, Homo Sapiens
ccaactccgcagtttctt

SEQ ID NO: 685 - DNA, 18 bp, Homo Sapiens
caactccgcagtttcttt

SEQ ID NO: 686 - DNA, 18 bp, Homo Sapiens
tttctccctctcccaacc

SEQ ID NO: 687 - DNA, 18 bp, Homo Sapiens
ttctccctctcccaacct

SEQ ID NO: 688 - DNA, 18 bp, Homo Sapiens
tctccctctcccaaccta

SEQ ID NO: 689 - DNA, 18 bp, Homo Sapiens
ctccctctcccaacctat

SEQ ID NO: 690 - DNA, 18 bp, Homo Sapiens
tccctctcccaacctatg

SEQ ID NO: 691 - DNA, 18 bp, Homo Sapiens
ccctctcccaacctatgt

SEQ ID NO: 692 - DNA, 18 bp, Homo Sapiens
cctctcccaacctatgta

SEQ ID NO: 693 - DNA, 18 bp, Homo Sapiens
ctctcccaacctatgtag

SEQ ID NO: 694 - DNA, 18 bp, Homo Sapiens
tctcccaacctatgtagg

SEQ ID NO: 695 - DNA, 18 bp, Homo Sapiens
ctcccaacctatgtaggg

SEQ ID NO: 696 - DNA, 18 bp, Homo Sapiens
tcccaacctatgtagggt

SEQ ID NO: 697 - DNA, 18 bp, Homo Sapiens
cccaacctatgtagggtc

SEQ ID NO: 698 - DNA, 18 bp, Homo Sapiens
ccaacctatgtagggtcc

SEQ ID NO: 699 - DNA, 18 bp, Homo Sapiens
caacctatgtagggtcct

SEQ ID NO: 700 - DNA, 18 bp, Homo Sapiens
aacctatgtagggtcctt

SEQ ID NO: 701 - DNA, 18 bp, Homo Sapiens
acctatgtagggtccttc

SEQ ID NO: 702 - DNA, 18 bp, Homo Sapiens
cctatgtagggtccttct

SEQ ID NO: 703 - DNA, 18 bp, Homo Sapiens
ctatgtagggtccttctt

SEQ ID NO: 704 - DNA, 18 bp, Homo Sapiens
tatgtagggtccttcttc

SEQ ID NO: 705 - DNA, 18 bp, Homo Sapiens
atgtagggtccttcttcc

SEQ ID NO: 706 - DNA, 18 bp, Homo Sapiens
tgtagggtccttcttcct

SEQ ID NO: 707 - DNA, 18 bp, Homo Sapiens
gtagggtccttcttcctg

SEQ ID NO: 708 - DNA, 18 bp, Homo Sapiens
tagggtccttcttcctgg

SEQ ID NO: 709 - DNA, 18 bp, Homo Sapiens
agggtccttcttcctgga

SEQ ID NO: 710 - DNA, 18 bp, Homo Sapiens
gggtccttcttcctggat

SEQ ID NO: 711 - DNA, 18 bp, Homo Sapiens
ggtccttcttcctggata

SEQ ID NO: 712 - DNA, 18 bp, Homo Sapiens
gtccttcttcctggatac

SEQ ID NO: 713 - DNA, 18 bp, Homo Sapiens
tccttcttcctggatact

SEQ ID NO: 714 - DNA, 18 bp, Homo Sapiens
ccttcttcctggatactc

SEQ ID NO: 715 - DNA, 18 bp, Homo Sapiens
cttcttcctggatactca

SEQ ID NO: 716 - DNA, 18 bp, Homo Sapiens
ttcttcctggatactcac

SEQ ID NO: 717 - DNA, 18 bp, Homo Sapiens
tcttcctggatactcacg

SEQ ID NO: 718 - DNA, 18 bp, Homo Sapiens
cttcctggatactcacga

SEQ ID NO: 719 - DNA, 18 bp, Homo Sapiens
ttcctggatactcacgac

SEQ ID NO: 720 - DNA, 18 bp, Homo Sapiens
tcctggatactcacgacg

SEQ ID NO: 721 - DNA, 18 bp, Homo Sapiens
acccagttctcactccca

SEQ ID NO: 722 - DNA, 18 bp, Homo Sapiens
cccagttctcactcccat

SEQ ID NO: 723 - DNA, 18 bp, Homo Sapiens
ccagttctcactcccatt

SEQ ID NO: 724 - DNA, 18 bp, Homo Sapiens
cagttctcactcccattg

SEQ ID NO: 725 - DNA, 18 bp, Homo Sapiens
agttctcactcccattgg

SEQ ID NO: 726 - DNA, 18 bp, Homo Sapiens
gttctcactcccattggg

SEQ ID NO: 727 - DNA, 18 bp, Homo Sapiens
ttctcactcccattgggt

SEQ ID NO: 728 - DNA, 18 bp, Homo Sapiens
tctcactcccattgggtg

SEQ ID NO: 729 - DNA, 18 bp, Homo Sapiens
ctcactcccattgggtgt

SEQ ID NO: 730 - DNA, 18 bp, Homo Sapiens
tcactcccattgggtgtc

SEQ ID NO: 731 - DNA, 18 bp, Homo Sapiens
ccattgggtgtcgggttt

SEQ ID NO: 732 - DNA, 18 bp, Homo Sapiens
cattgggtgtcgggtttc

SEQ ID NO: 733 - DNA, 18 bp, Homo Sapiens
attgggtgtcgggtttcc

SEQ ID NO: 734 - DNA, 18 bp, Homo Sapiens
ttgggtgtcgggtttcca

SEQ ID NO: 735 - DNA, 18 bp, Homo Sapiens
gtgtcgggtttccagaga

SEQ ID NO: 736 - DNA, 18 bp, Homo Sapiens
tgtcgggtttccagagaa

SEQ ID NO: 737 - DNA, 18 bp, Homo Sapiens
gtcgggtttccagagaag

SEQ ID NO: 738 - DNA, 18 bp, Homo Sapiens
tcgggtttccagagaagc

SEQ ID NO: 739 - DNA, 18 bp, Homo Sapiens
gggtttccagagaagcca

SEQ ID NO: 740 - DNA, 18 bp, Homo Sapiens
ggtttccagagaagccaa

SEQ ID NO: 741 - DNA, 18 bp, Homo Sapiens
gtttccagagaagccaat

SEQ ID NO: 742 - DNA, 18 bp, Homo Sapiens
tttccagagaagccaatc

SEQ ID NO: 743 - DNA, 18 bp, Homo Sapiens
ttccagagaagccaatca

SEQ ID NO: 744 - DNA, 18 bp, Homo Sapiens
tccagagaagccaatcag

SEQ ID NO: 745 - DNA, 18 bp, Homo Sapiens
ccagagaagccaatcagt

SEQ ID NO: 746 - DNA, 18 bp, Homo Sapiens
cagagaagccaatcagtg

SEQ ID NO: 747 - DNA, 18 bp, Homo Sapiens
agagaagccaatcagtgt

SEQ ID NO: 748 - DNA, 18 bp, Homo Sapiens
gagaagccaatcagtgtc

SEQ ID NO: 749 - DNA, 18 bp, Homo Sapiens
agaagccaatcagtgtcg

SEQ ID NO: 750 - DNA, 18 bp, Homo Sapiens
gaagccaatcagtgtcgt

SEQ ID NO: 751 - DNA, 18 bp, Homo Sapiens
aagccaatcagtgtcgtc

SEQ ID NO: 752 - DNA, 18 bp, Homo Sapiens
agccaatcagtgtcgtcg

SEQ ID NO: 753 - DNA, 18 bp, Homo Sapiens
aatcagtgtcgtcgcggt

SEQ ID NO: 754 - DNA, 18 bp, Homo Sapiens
cggtcgcggttctaaagt

SEQ ID NO: 755 - DNA, 18 bp, Homo Sapiens
ggtcgcggttctaaagtc

SEQ ID NO: 756 - DNA, 18 bp, Homo Sapiens
gtcgcggttctaaagtcc

SEQ ID NO: 757 - DNA, 18 bp, Homo Sapiens
tcgcggttctaaagtccg

SEQ ID NO: 758 - DNA, 18 bp, Homo Sapiens
gcggttctaaagtccgca

SEQ ID NO: 759 - DNA, 18 bp, Homo Sapiens
cggttctaaagtccgcac

SEQ ID NO: 760 - DNA, 18 bp, Homo Sapiens
ggttctaaagtccgcacg

SEQ ID NO: 761 - DNA, 18 bp, Homo Sapiens
gttctaaagtccgcacgc

SEQ ID NO: 762 - DNA, 18 bp, Homo Sapiens
ttctaaagtccgcacgca

SEQ ID NO: 763 - DNA, 18 bp, Homo Sapiens
tctaaagtccgcacgcac

SEQ ID NO: 764 - DNA, 18 bp, Homo Sapiens
caccgggactcagattct

SEQ ID NO: 765 - DNA, 18 bp, Homo Sapiens
accgggactcagattctc

SEQ ID NO: 766 - DNA, 18 bp, Homo Sapiens
aaccctcgtcctgctact

SEQ ID NO: 767 - DNA, 18 bp, Homo Sapiens
gctctcactccatgaggt

SEQ ID NO: 768 - DNA, 18 bp, Homo Sapiens
ctctcactccatgaggta

SEQ ID NO: 769 - DNA, 18 bp, Homo Sapiens
tctcactccatgaggtat

SEQ ID NO: 770 - DNA, 18 bp, Homo Sapiens
ctcactccatgaggtatt

SEQ ID NO: 771 - DNA, 18 bp, Homo Sapiens
tcactccatgaggtattt

SEQ ID NO: 772 - DNA, 18 bp, Homo Sapiens
cactccatgaggtatttc

SEQ ID NO: 773 - DNA, 18 bp, Homo Sapiens
actccatgaggtatttct

SEQ ID NO: 774 - DNA, 18 bp, Homo Sapiens
ctccatgaggtatttctt

SEQ ID NO: 775 - DNA, 18 bp, Homo Sapiens
tccatgaggtatttcttc

SEQ ID NO: 776 - DNA, 18 bp, Homo Sapiens
ccatgaggtatttcttca

SEQ ID NO: 777 - DNA, 18 bp, Homo Sapiens
catgaggtatttcttcac

SEQ ID NO: 778 - DNA, 18 bp, Homo Sapiens
atgaggtatttcttcaca

SEQ ID NO: 779 - DNA, 18 bp, Homo Sapiens
tgaggtatttcttcacat

SEQ ID NO: 780 - DNA, 18 bp, Homo Sapiens
gaggtatttcttcacatc

SEQ ID NO: 781 - DNA, 18 bp, Homo Sapiens
aggtatttcttcacatcc

SEQ ID NO: 782 - DNA, 18 bp, Homo Sapiens
ggtatttcttcacatccg

SEQ ID NO: 783 - DNA, 18 bp, Homo Sapiens
gtatttcttcacatccgt

SEQ ID NO: 784 - DNA, 18 bp, Homo Sapiens
tatttcttcacatccgtg

SEQ ID NO: 785 - DNA, 18 bp, Homo Sapiens
atttcttcacatccgtgt

SEQ ID NO: 786 - DNA, 18 bp, Homo Sapiens
tttcttcacatccgtgtc

SEQ ID NO: 787 - DNA, 18 bp, Homo Sapiens
ttcttcacatccgtgtcc

SEQ ID NO: 788 - DNA, 18 bp, Homo Sapiens
tcttcacatccgtgtccc

SEQ ID NO: 789 - DNA, 18 bp, Homo Sapiens
cttcatcgcagtgggcta

SEQ ID NO: 790 - DNA, 18 bp, Homo Sapiens
ttcatcgcagtgggctac

SEQ ID NO: 791 - DNA, 18 bp, Homo Sapiens
agttcgtgcggttcgaca

SEQ ID NO: 792 - DNA, 18 bp, Homo Sapiens
tggatagagcaggagggt

SEQ ID NO: 793 - DNA, 18 bp, Homo Sapiens
aggagggtccggagtatt

SEQ ID NO: 794 - DNA, 18 bp, Homo Sapiens
gggagacacggaaagtga

SEQ ID NO: 795 - DNA, 18 bp, Homo Sapiens
ggagacacggaaagtgaa

SEQ ID NO: 796 - DNA, 18 bp, Homo Sapiens
gagacacggaaagtgaag

SEQ ID NO: 797 - DNA, 18 bp, Homo Sapiens
agacacggaaagtgaagg

SEQ ID NO: 798 - DNA, 18 bp, Homo Sapiens
gacacggaaagtgaaggc

SEQ ID NO: 799 - DNA, 18 bp, Homo Sapiens
acacggaaagtgaaggcc

SEQ ID NO: 800 - DNA, 18 bp, Homo Sapiens
acggaaagtgaaggccca

SEQ ID NO: 801 - DNA, 18 bp, Homo Sapiens
ggaaagtgaaggcccact

SEQ ID NO: 802 - DNA, 18 bp, Homo Sapiens
gaaagtgaaggcccactc

SEQ ID NO: 803 - DNA, 18 bp, Homo Sapiens
aaagtgaaggcccactca

SEQ ID NO: 804 - DNA, 18 bp, Homo Sapiens
aagtgaaggcccactcac

SEQ ID NO: 805 - DNA, 18 bp, Homo Sapiens
agtgaaggcccactcaca

SEQ ID NO: 806 - DNA, 18 bp, Homo Sapiens
tgaaggcccactcacaga

SEQ ID NO: 807 - DNA, 18 bp, Homo Sapiens
aaggcccactcacagact

SEQ ID NO: 808 - DNA, 18 bp, Homo Sapiens
cactcacagactcaccga

SEQ ID NO: 809 - DNA, 18 bp, Homo Sapiens
actcacagactcaccgag

SEQ ID NO: 810 - DNA, 18 bp, Homo Sapiens
ctcacagactcaccgagt

SEQ ID NO: 811 - DNA, 18 bp, Homo Sapiens
tcacagactcaccgagtg

SEQ ID NO: 812 - DNA, 18 bp, Homo Sapiens
acagactcaccgagtgga

SEQ ID NO: 813 - DNA, 18 bp, Homo Sapiens
gcggctactacaaccaga

SEQ ID NO: 814 - DNA, 18 bp, Homo Sapiens
cggctactacaaccagag

SEQ ID NO: 815 - DNA, 18 bp, Homo Sapiens
ggctactacaaccagagc

SEQ ID NO: 816 - DNA, 18 bp, Homo Sapiens
gctactacaaccagagcg

SEQ ID NO: 817 - DNA, 18 bp, Homo Sapiens
ctactacaaccagagcga

SEQ ID NO: 818 - DNA, 18 bp, Homo Sapiens
tactacaaccagagcgag

SEQ ID NO: 819 - DNA, 18 bp, Homo Sapiens
actacaaccagagcgagg

SEQ ID NO: 820 - DNA, 18 bp, Homo Sapiens
gttctcacaccgtccaga

SEQ ID NO: 821 - DNA, 18 bp, Homo Sapiens
ttctcacaccgtccagag

SEQ ID NO: 822 - DNA, 18 bp, Homo Sapiens
tcacaccgtccagaggat

SEQ ID NO: 823 - DNA, 18 bp, Homo Sapiens
acaccgtccagaggatgt

SEQ ID NO: 824 - DNA, 18 bp, Homo Sapiens
caccgtccagaggatgta

SEQ ID NO: 825 - DNA, 18 bp, Homo Sapiens
accgtccagaggatgtat

SEQ ID NO: 826 - DNA, 18 bp, Homo Sapiens
ccgtccagaggatgtatg

SEQ ID NO: 827 - DNA, 18 bp, Homo Sapiens
cgtccagaggatgtatgg

SEQ ID NO: 828 - DNA, 18 bp, Homo Sapiens
gtccagaggatgtatggc

SEQ ID NO: 829 - DNA, 18 bp, Homo Sapiens
tccagaggatgtatggct

SEQ ID NO: 830 - DNA, 18 bp, Homo Sapiens
ccagaggatgtatggctg

SEQ ID NO: 831 - DNA, 18 bp, Homo Sapiens
cagaggatgtatggctgc

SEQ ID NO: 832 - DNA, 18 bp, Homo Sapiens
agaggatgtatggctgcg

SEQ ID NO: 833 - DNA, 18 bp, Homo Sapiens
gaggatgtatggctgcga

SEQ ID NO: 834 - DNA, 18 bp, Homo Sapiens
aggatgtatggctgcgac

SEQ ID NO: 835 - DNA, 18 bp, Homo Sapiens
gatgtatggctgcgacgt

SEQ ID NO: 836 - DNA, 18 bp, Homo Sapiens
atgtatggctgcgacgtg

SEQ ID NO: 837 - DNA, 18 bp, Homo Sapiens
gtaccaccagtacgccta

SEQ ID NO: 838 - DNA, 18 bp, Homo Sapiens
taccaccagtacgcctac

SEQ ID NO: 839 - DNA, 18 bp, Homo Sapiens
cctacgacggcaaggatt

SEQ ID NO: 840 - DNA, 18 bp, Homo Sapiens
ctacgacggcaaggatta

SEQ ID NO: 841 - DNA, 18 bp, Homo Sapiens
tacgacggcaaggattac

SEQ ID NO: 842 - DNA, 18 bp, Homo Sapiens
acgacggcaaggattaca

SEQ ID NO: 843 - DNA, 18 bp, Homo Sapiens
cgacggcaaggattacat

SEQ ID NO: 844 - DNA, 18 bp, Homo Sapiens
gacggcaaggattacatc

SEQ ID NO: 845 - DNA, 18 bp, Homo Sapiens
acggcaaggattacatcg

SEQ ID NO: 846 - DNA, 18 bp, Homo Sapiens
cggcaaggattacatcgc

SEQ ID NO: 847 - DNA, 18 bp, Homo Sapiens
ggcaaggattacatcgcc

SEQ ID NO: 848 - DNA, 18 bp, Homo Sapiens
gcaaggattacatcgccc

SEQ ID NO: 849 - DNA, 18 bp, Homo Sapiens
caaggattacatcgccct

SEQ ID NO: 850 - DNA, 18 bp, Homo Sapiens
aaggattacatcgccctg

SEQ ID NO: 851 - DNA, 18 bp, Homo Sapiens
aggattacatcgccctga

SEQ ID NO: 852 - DNA, 18 bp, Homo Sapiens
ggattacatcgccctgaa

SEQ ID NO: 853 - DNA, 18 bp, Homo Sapiens
gattacatcgccctgaaa

SEQ ID NO: 854 - DNA, 18 bp, Homo Sapiens
attacatcgccctgaaag

SEQ ID NO: 855 - DNA, 18 bp, Homo Sapiens
ttacatcgccctgaaaga

SEQ ID NO: 856 - DNA, 18 bp, Homo Sapiens
tacatcgccctgaaagag

SEQ ID NO: 857 - DNA, 18 bp, Homo Sapiens
acatcgccctgaaagagg

SEQ ID NO: 858 - DNA, 18 bp, Homo Sapiens
catcgccctgaaagagga

SEQ ID NO: 859 - DNA, 18 bp, Homo Sapiens
atcgccctgaaagaggac

SEQ ID NO: 860 - DNA, 18 bp, Homo Sapiens
tgaaagaggacctgcgct

SEQ ID NO: 861 - DNA, 18 bp, Homo Sapiens
aaagaggacctgcgctct

SEQ ID NO: 862 - DNA, 18 bp, Homo Sapiens
aagaggacctgcgctctt

SEQ ID NO: 863 - DNA, 18 bp, Homo Sapiens
acatggcagctcagacca

SEQ ID NO: 864 - DNA, 18 bp, Homo Sapiens
agctcagaccaccaagca

SEQ ID NO: 865 - DNA, 18 bp, Homo Sapiens
ctcagaccaccaagcaca

SEQ ID NO: 866 - DNA, 18 bp, Homo Sapiens
tcagaccaccaagcacaa

SEQ ID NO: 867 - DNA, 18 bp, Homo Sapiens
cagaccaccaagcacaag

SEQ ID NO: 868 - DNA, 18 bp, Homo Sapiens
agaccaccaagcacaagt

SEQ ID NO: 869 - DNA, 18 bp, Homo Sapiens
gaccaccaagcacaagtg

SEQ ID NO: 870 - DNA, 18 bp, Homo Sapiens
accaccaagcacaagtgg

SEQ ID NO: 871 - DNA, 18 bp, Homo Sapiens
caccaagcacaagtggga

SEQ ID NO: 872 - DNA, 18 bp, Homo Sapiens
accaagcacaagtgggag

SEQ ID NO: 873 - DNA, 18 bp, Homo Sapiens
atgtggcggagcagttga

SEQ ID NO: 874 - DNA, 18 bp, Homo Sapiens
ggagcagttgagagccta

SEQ ID NO: 875 - DNA, 18 bp, Homo Sapiens
gagcagttgagagcctac

SEQ ID NO: 876 - DNA, 18 bp, Homo Sapiens
agcagttgagagcctacc

SEQ ID NO: 877 - DNA, 18 bp, Homo Sapiens
gcagttgagagcctacct

SEQ ID NO: 878 - DNA, 18 bp, Homo Sapiens
cagttgagagcctacctg

SEQ ID NO: 879 - DNA, 18 bp, Homo Sapiens
agttgagagcctacctgg

SEQ ID NO: 880 - DNA, 18 bp, Homo Sapiens
gttgagagcctacctgga

SEQ ID NO: 881 - DNA, 18 bp, Homo Sapiens
ttgagagcctacctggag

SEQ ID NO: 882 - DNA, 18 bp, Homo Sapiens
tccgcagatacctggaga

SEQ ID NO: 883 - DNA, 18 bp, Homo Sapiens
ccgcagatacctggagaa

SEQ ID NO: 884 - DNA, 18 bp, Homo Sapiens
cgcagatacctggagaac

SEQ ID NO: 885 - DNA, 18 bp, Homo Sapiens
gcagatacctggagaacg

SEQ ID NO: 886 - DNA, 18 bp, Homo Sapiens
cagatacctggagaacgg

SEQ ID NO: 887 - DNA, 18 bp, Homo Sapiens
agatacctggagaacggg

SEQ ID NO: 888 - DNA, 18 bp, Homo Sapiens
gatacctggagaacggga

SEQ ID NO: 889 - DNA, 18 bp, Homo Sapiens
atacctggagaacgggaa

SEQ ID NO: 890 - DNA, 18 bp, Homo Sapiens
tacctggagaacgggaag

SEQ ID NO: 891 - DNA, 18 bp, Homo Sapiens
tggagaacgggaaggaga

SEQ ID NO: 892 - DNA, 18 bp, Homo Sapiens
aaacgcatatgactcacc

SEQ ID NO: 893 - DNA, 18 bp, Homo Sapiens
aacgcatatgactcacca

SEQ ID NO: 894 - DNA, 18 bp, Homo Sapiens
acgcatatgactcaccac

SEQ ID NO: 895 - DNA, 18 bp, Homo Sapiens
cgcatatgactcaccacg

SEQ ID NO: 896 - DNA, 18 bp, Homo Sapiens
gcatatgactcaccacgc

SEQ ID NO: 897 - DNA, 18 bp, Homo Sapiens
catatgactcaccacgct

SEQ ID NO: 898 - DNA, 18 bp, Homo Sapiens
atatgactcaccacgctg

SEQ ID NO: 899 - DNA, 18 bp, Homo Sapiens
tatgactcaccacgctgt

SEQ ID NO: 900 - DNA, 18 bp, Homo Sapiens
atgactcaccacgctgtc

SEQ ID NO: 901 - DNA, 18 bp, Homo Sapiens
tgactcaccacgctgtct

SEQ ID NO: 902 - DNA, 18 bp, Homo Sapiens
actcaccacgctgtctct

SEQ ID NO: 903 - DNA, 18 bp, Homo Sapiens
tcaccacgctgtctctga

SEQ ID NO: 904 - DNA, 18 bp, Homo Sapiens
cacgctgtctctgaccat

SEQ ID NO: 905 - DNA, 18 bp, Homo Sapiens
acgctgtctctgaccatg

SEQ ID NO: 906 - DNA, 18 bp, Homo Sapiens
cgctgtctctgaccatga

SEQ ID NO: 907 - DNA, 18 bp, Homo Sapiens
gctgtctctgaccatgaa

SEQ ID NO: 908 - DNA, 18 bp, Homo Sapiens
ctgtctctgaccatgaag

SEQ ID NO: 909 - DNA, 18 bp, Homo Sapiens
tgtctctgaccatgaagc

SEQ ID NO: 910 - DNA, 18 bp, Homo Sapiens
gtctctgaccatgaagcc

SEQ ID NO: 911 - DNA, 18 bp, Homo Sapiens
tctctgaccatgaagcca

SEQ ID NO: 912 - DNA, 18 bp, Homo Sapiens
ctctgaccatgaagccac

SEQ ID NO: 913 - DNA, 18 bp, Homo Sapiens
tctgaccatgaagccacc

SEQ ID NO: 914 - DNA, 18 bp, Homo Sapiens
tgaccatgaagccaccct

SEQ ID NO: 915 - DNA, 18 bp, Homo Sapiens
accatgaagccaccctga

SEQ ID NO: 916 - DNA, 18 bp, Homo Sapiens
atgaagccaccctgaggt

SEQ ID NO: 917 - DNA, 18 bp, Homo Sapiens
cttctaccctgcggagat

SEQ ID NO: 918 - DNA, 18 bp, Homo Sapiens
ttctaccctgcggagatc

SEQ ID NO: 919 - DNA, 18 bp, Homo Sapiens
tctaccctgcggagatca

SEQ ID NO: 920 - DNA, 18 bp, Homo Sapiens
taccctgcggagatcaca

SEQ ID NO: 921 - DNA, 18 bp, Homo Sapiens
ctgcggagatcacactga

SEQ ID NO: 922 - DNA, 18 bp, Homo Sapiens
tgcggagatcacactgac

SEQ ID NO: 923 - DNA, 18 bp, Homo Sapiens
cggagatcacactgacct

SEQ ID NO: 924 - DNA, 18 bp, Homo Sapiens
ggagatcacactgacctg

SEQ ID NO: 925 - DNA, 18 bp, Homo Sapiens
gagatcacactgacctgg

SEQ ID NO: 926 - DNA, 18 bp, Homo Sapiens
agatcacactgacctggc

SEQ ID NO: 927 - DNA, 18 bp, Homo Sapiens
gatcacactgacctggca

SEQ ID NO: 928 - DNA, 18 bp, Homo Sapiens
atcacactgacctggcag

SEQ ID NO: 929 - DNA, 18 bp, Homo Sapiens
gggatggaaccttccaga

SEQ ID NO: 930 - DNA, 18 bp, Homo Sapiens
ggatggaaccttccagaa

SEQ ID NO: 931 - DNA, 18 bp, Homo Sapiens
gatggaaccttccagaag

SEQ ID NO: 932 - DNA, 18 bp, Homo Sapiens
atggaaccttccagaagt

SEQ ID NO: 933 - DNA, 18 bp, Homo Sapiens
tggaaccttccagaagtg

SEQ ID NO: 934 - DNA, 18 bp, Homo Sapiens
ggaaccttccagaagtgg

SEQ ID NO: 935 - DNA, 18 bp, Homo Sapiens
gaaccttccagaagtggg

SEQ ID NO: 936 - DNA, 18 bp, Homo Sapiens
aaccttccagaagtgggc

SEQ ID NO: 937 - DNA, 18 bp, Homo Sapiens
cttctggacaggagcaga

SEQ ID NO: 938 - DNA, 18 bp, Homo Sapiens
ttctggacaggagcagag

SEQ ID NO: 939 - DNA, 18 bp, Homo Sapiens
tctggacaggagcagaga

SEQ ID NO: 940 - DNA, 18 bp, Homo Sapiens
ctggacaggagcagagat

SEQ ID NO: 941 - DNA, 18 bp, Homo Sapiens
tggacaggagcagagata

SEQ ID NO: 942 - DNA, 18 bp, Homo Sapiens
ggacaggagcagagatac

SEQ ID NO: 943 - DNA, 18 bp, Homo Sapiens
gacaggagcagagataca

SEQ ID NO: 944 - DNA, 18 bp, Homo Sapiens
acaggagcagagatacac

SEQ ID NO: 945 - DNA, 18 bp, Homo Sapiens
caggagcagagatacacc

SEQ ID NO: 946 - DNA, 18 bp, Homo Sapiens
aggagcagagatacacct

SEQ ID NO: 947 - DNA, 18 bp, Homo Sapiens
ggagcagagatacacctg

SEQ ID NO: 948 - DNA, 18 bp, Homo Sapiens
gagcagagatacacctgc

SEQ ID NO: 949 - DNA, 18 bp, Homo Sapiens
agcagagatacacctgcc

SEQ ID NO: 950 - DNA, 18 bp, Homo Sapiens
gcagagatacacctgcca

SEQ ID NO: 951 - DNA, 18 bp, Homo Sapiens
cagagatacacctgccat

SEQ ID NO: 952 - DNA, 18 bp, Homo Sapiens
agagatacacctgccatg

SEQ ID NO: 953 - DNA, 18 bp, Homo Sapiens
gagatacacctgccatgt

SEQ ID NO: 954 - DNA, 18 bp, Homo Sapiens
agatacacctgccatgtg

SEQ ID NO: 955 - DNA, 18 bp, Homo Sapiens
gatacacctgccatgtgc

SEQ ID NO: 956 - DNA, 18 bp, Homo Sapiens
atacacctgccatgtgca

SEQ ID NO: 957 - DNA, 18 bp, Homo Sapiens
tacacctgccatgtgcag

SEQ ID NO: 958 - DNA, 18 bp, Homo Sapiens
acctgccatgtgcagcat

SEQ ID NO: 959 - DNA, 18 bp, Homo Sapiens
ctgccatgtgcagcatga

SEQ ID NO: 960 - DNA, 18 bp, Homo Sapiens
tgccatgtgcagcatgag

SEQ ID NO: 961 - DNA, 18 bp, Homo Sapiens
catgtgcagcatgagggt

SEQ ID NO: 962 - DNA, 18 bp, Homo Sapiens
atgtgcagcatgagggtt

SEQ ID NO: 963 - DNA, 18 bp, Homo Sapiens
tgtgcagcatgagggttt

SEQ ID NO: 964 - DNA, 18 bp, Homo Sapiens
gtgcagcatgagggtttg

SEQ ID NO: 965 - DNA, 18 bp, Homo Sapiens
tgcagcatgagggtttgc

SEQ ID NO: 966 - DNA, 18 bp, Homo Sapiens
agcatgagggtttgccca

SEQ ID NO: 967 - DNA, 18 bp, Homo Sapiens
gcatgagggtttgcccaa

SEQ ID NO: 968 - DNA, 18 bp, Homo Sapiens
catgagggtttgcccaag

SEQ ID NO: 969 - DNA, 18 bp, Homo Sapiens
atgagggtttgcccaagc

SEQ ID NO: 970 - DNA, 18 bp, Homo Sapiens
tgagatgggagccgtctt

SEQ ID NO: 971 - DNA, 18 bp, Homo Sapiens
cccatcgtgggcatcatt

SEQ ID NO: 972 - DNA, 18 bp, Homo Sapiens
ccatcgtgggcatcattg

SEQ ID NO: 973 - DNA, 18 bp, Homo Sapiens
catcgtgggcatcattgc

SEQ ID NO: 974 - DNA, 18 bp, Homo Sapiens
atcgtgggcatcattgct

SEQ ID NO: 975 - DNA, 18 bp, Homo Sapiens
tcgtgggcatcattgctg

SEQ ID NO: 976 - DNA, 18 bp, Homo Sapiens
catcattgctggcctggt

SEQ ID NO: 977 - DNA, 18 bp, Homo Sapiens
atcattgctggcctggtt

SEQ ID NO: 978 - DNA, 18 bp, Homo Sapiens
tcattgctggcctggttc

SEQ ID NO: 979 - DNA, 18 bp, Homo Sapiens
cattgctggcctggttct

SEQ ID NO: 980 - DNA, 18 bp, Homo Sapiens
attgctggcctggttctc

SEQ ID NO: 981 - DNA, 18 bp, Homo Sapiens
ttgctggcctggttctct

SEQ ID NO: 982 - DNA, 18 bp, Homo Sapiens
tgctggcctggttctctt

SEQ ID NO: 983 - DNA, 18 bp, Homo Sapiens
gctggcctggttctcttt

SEQ ID NO: 984 - DNA, 18 bp, Homo Sapiens
ctggcctggttctctttg

SEQ ID NO: 985 - DNA, 18 bp, Homo Sapiens
tggcctggttctctttgg

SEQ ID NO: 986 - DNA, 18 bp, Homo Sapiens
ggcctggttctctttgga

SEQ ID NO: 987 - DNA, 18 bp, Homo Sapiens
gcctggttctctttggag

SEQ ID NO: 988 - DNA, 18 bp, Homo Sapiens
cctggttctctttggagc

SEQ ID NO: 989 - DNA, 18 bp, Homo Sapiens
ctggttctctttggagct

SEQ ID NO: 990 - DNA, 18 bp, Homo Sapiens
tggttctctttggagctg

SEQ ID NO: 991 - DNA, 18 bp, Homo Sapiens
ggttctctttggagctgt

SEQ ID NO: 992 - DNA, 18 bp, Homo Sapiens
gttctctttggagctgtg

SEQ ID NO: 993 - DNA, 18 bp, Homo Sapiens
ttctctttggagctgtga

SEQ ID NO: 994 - DNA, 18 bp, Homo Sapiens
tctctttggagctgtgat

SEQ ID NO: 995 - DNA, 18 bp, Homo Sapiens
ctctttggagctgtgatc

SEQ ID NO: 996 - DNA, 18 bp, Homo Sapiens
tctttggagctgtgatca

SEQ ID NO: 997 - DNA, 18 bp, Homo Sapiens
ctttggagctgtgatcac

SEQ ID NO: 998 - DNA, 18 bp, Homo Sapiens
tttggagctgtgatcact

SEQ ID NO: 999 - DNA, 18 bp, Homo Sapiens
ttggagctgtgatcactg

SEQ ID NO: 1000 - DNA, 18 bp, Homo Sapiens
tggagctgtgatcactgg

SEQ ID NO: 1001 - DNA, 18 bp, Homo Sapiens
ggagctgtgatcactgga

SEQ ID NO: 1002 - DNA, 18 bp, Homo Sapiens
gagctgtgatcactggag

SEQ ID NO: 1003 - DNA, 18 bp, Homo Sapiens
agctgtgatcactggagc

SEQ ID NO: 1004 - DNA, 18 bp, Homo Sapiens
gctgtgatcactggagct

SEQ ID NO: 1005 - DNA, 18 bp, Homo Sapiens
ctgtgatcactggagctg

SEQ ID NO: 1006 - DNA, 18 bp, Homo Sapiens
tgtgatcactggagctgt

SEQ ID NO: 1007 - DNA, 18 bp, Homo Sapiens
gtgatcactggagctgtg

SEQ ID NO: 1008 - DNA, 18 bp, Homo Sapiens
tgatcactggagctgtgg

SEQ ID NO: 1009 - DNA, 18 bp, Homo Sapiens
gatcactggagctgtggt

SEQ ID NO: 1010 - DNA, 18 bp, Homo Sapiens
atcactggagctgtggtc

SEQ ID NO: 1011 - DNA, 18 bp, Homo Sapiens
tgtggtcgctgctgtgat

SEQ ID NO: 1012 - DNA, 18 bp, Homo Sapiens
tggtcgctgctgtgatgt

SEQ ID NO: 1013 - DNA, 18 bp, Homo Sapiens
tcgctgctgtgatgtgga

SEQ ID NO: 1014 - DNA, 18 bp, Homo Sapiens
ctgctgtgatgtggagga

SEQ ID NO: 1015 - DNA, 18 bp, Homo Sapiens
tgctgtgatgtggaggag

SEQ ID NO: 1016 - DNA, 18 bp, Homo Sapiens
ctgtgatgtggaggagga

SEQ ID NO: 1017 - DNA, 18 bp, Homo Sapiens
tgtgatgtggaggaggaa

SEQ ID NO: 1018 - DNA, 18 bp, Homo Sapiens
gtgatgtggaggaggaag

SEQ ID NO: 1019 - DNA, 18 bp, Homo Sapiens
tgatgtggaggaggaaga

SEQ ID NO: 1020 - DNA, 18 bp, Homo Sapiens
gatgtggaggaggaagag

SEQ ID NO: 1021 - DNA, 18 bp, Homo Sapiens
atgtggaggaggaagagc

SEQ ID NO: 1022 - DNA, 18 bp, Homo Sapiens
tgtggaggaggaagagct

SEQ ID NO: 1023 - DNA, 18 bp, Homo Sapiens
tggaggaggaagagctca

SEQ ID NO: 1024 - DNA, 18 bp, Homo Sapiens
gaggaggaagagctcaga

SEQ ID NO: 1025 - DNA, 18 bp, Homo Sapiens
aggaggaagagctcagat

SEQ ID NO: 1026 - DNA, 18 bp, Homo Sapiens
ggaggaagagctcagata

SEQ ID NO: 1027 - DNA, 18 bp, Homo Sapiens
gaggaagagctcagatag

SEQ ID NO: 1028 - DNA, 18 bp, Homo Sapiens
aggaagagctcagataga

SEQ ID NO: 1029 - DNA, 18 bp, Homo Sapiens
ggaagagctcagatagaa

SEQ ID NO: 1030 - DNA, 18 bp, Homo Sapiens
gaagagctcagatagaaa

SEQ ID NO: 1031 - DNA, 18 bp, Homo Sapiens
aaaggagggagctactct

SEQ ID NO: 1032 - DNA, 18 bp, Homo Sapiens
aaggagggagctactctc

SEQ ID NO: 1033 - DNA, 18 bp, Homo Sapiens
aggagggagctactctca

SEQ ID NO: 1034 - DNA, 18 bp, Homo Sapiens
agctactctcaggctgca

SEQ ID NO: 1035 - DNA, 18 bp, Homo Sapiens
gctactctcaggctgcaa

SEQ ID NO: 1036 - DNA, 18 bp, Homo Sapiens
ctactctcaggctgcaag

SEQ ID NO: 1037 - DNA, 18 bp, Homo Sapiens
tactctcaggctgcaagc

SEQ ID NO: 1038 - DNA, 18 bp, Homo Sapiens
actctcaggctgcaagca

SEQ ID NO: 1039 - DNA, 18 bp, Homo Sapiens
tctcaggctgcaagcagt

SEQ ID NO: 1040 - DNA, 18 bp, Homo Sapiens
tcaggctgcaagcagtga

SEQ ID NO: 1041 - DNA, 18 bp, Homo Sapiens
aggctgcaagcagtgaca

SEQ ID NO: 1042 - DNA, 18 bp, Homo Sapiens
gctgcaagcagtgacagt

SEQ ID NO: 1043 - DNA, 18 bp, Homo Sapiens
ctgcaagcagtgacagtg

SEQ ID NO: 1044 - DNA, 18 bp, Homo Sapiens
tgcaagcagtgacagtgc

SEQ ID NO: 1045 - DNA, 18 bp, Homo Sapiens
aagcagtgacagtgccca

SEQ ID NO: 1046 - DNA, 18 bp, Homo Sapiens
cagggctctgatgtgtct

SEQ ID NO: 1047 - DNA, 18 bp, Homo Sapiens
agggctctgatgtgtctc

SEQ ID NO: 1048 - DNA, 18 bp, Homo Sapiens
gggctctgatgtgtctct

SEQ ID NO: 1049 - DNA, 18 bp, Homo Sapiens
ggctctgatgtgtctctc

SEQ ID NO: 1050 - DNA, 18 bp, Homo Sapiens
gctctgatgtgtctctca

SEQ ID NO: 1051 - DNA, 18 bp, Homo Sapiens
ctctgatgtgtctctcac

SEQ ID NO: 1052 - DNA, 18 bp, Homo Sapiens
tctgatgtgtctctcaca

SEQ ID NO: 1053 - DNA, 18 bp, Homo Sapiens
ctgatgtgtctctcacag

SEQ ID NO: 1054 - DNA, 18 bp, Homo Sapiens
tgatgtgtctctcacagc

SEQ ID NO: 1055 - DNA, 18 bp, Homo Sapiens
gatgtgtctctcacagct

SEQ ID NO: 1056 - DNA, 18 bp, Homo Sapiens
atgtgtctctcacagctt

SEQ ID NO: 1057 - DNA, 18 bp, Homo Sapiens
tgtgtctctcacagcttg

SEQ ID NO: 1058 - DNA, 18 bp, Homo Sapiens
gtgtctctcacagcttgt

SEQ ID NO: 1059 - DNA, 18 bp, Homo Sapiens
tgtctctcacagcttgta

SEQ ID NO: 1060 - DNA, 18 bp, Homo Sapiens
gtctctcacagcttgtaa

SEQ ID NO: 1061 - DNA, 18 bp, Homo Sapiens
tctctcacagcttgtaaa

SEQ ID NO: 1062 - DNA, 18 bp, Homo Sapiens
ctctcacagcttgtaaag

SEQ ID NO: 1063 - DNA, 18 bp, Homo Sapiens
tctcacagcttgtaaagt

SEQ ID NO: 1064 - DNA, 18 bp, Homo Sapiens
ctcacagcttgtaaagtg

SEQ ID NO: 1065 - DNA, 18 bp, Homo Sapiens
tcacagcttgtaaagtgt

SEQ ID NO: 1066 - DNA, 18 bp, Homo Sapiens
cacagcttgtaaagtgtg

SEQ ID NO: 1067 - DNA, 18 bp, Homo Sapiens
acagcttgtaaagtgtga

SEQ ID NO: 1068 - DNA, 18 bp, Homo Sapiens
cagcttgtaaagtgtgag

SEQ ID NO: 1069 - DNA, 18 bp, Homo Sapiens
agcttgtaaagtgtgaga

SEQ ID NO: 1070 - DNA, 18 bp, Homo Sapiens
gcttgtaaagtgtgagac

SEQ ID NO: 1071 - DNA, 18 bp, Homo Sapiens
cttgtaaagtgtgagaca

SEQ ID NO: 1072 - DNA, 18 bp, Homo Sapiens
ttgtaaagtgtgagacag

SEQ ID NO: 1073 - DNA, 18 bp, Homo Sapiens
tgtaaagtgtgagacagc

SEQ ID NO: 1074 - DNA, 18 bp, Homo Sapiens
gtaaagtgtgagacagct

SEQ ID NO: 1075 - DNA, 18 bp, Homo Sapiens
taaagtgtgagacagctg

SEQ ID NO: 1076 - DNA, 18 bp, Homo Sapiens
aaagtgtgagacagctgc

SEQ ID NO: 1077 - DNA, 18 bp, Homo Sapiens
aagtgtgagacagctgcc

SEQ ID NO: 1078 - DNA, 18 bp, Homo Sapiens
agtgtgagacagctgcct

SEQ ID NO: 1079 - DNA, 18 bp, Homo Sapiens
gtgtgagacagctgcctt

SEQ ID NO: 1080 - DNA, 18 bp, Homo Sapiens
tgtgagacagctgccttg

SEQ ID NO: 1081 - DNA, 18 bp, Homo Sapiens
gtgagacagctgccttgt

SEQ ID NO: 1082 - DNA, 18 bp, Homo Sapiens
tgagacagctgccttgtg

SEQ ID NO: 1083 - DNA, 18 bp, Homo Sapiens
gagacagctgccttgtgt

SEQ ID NO: 1084 - DNA, 18 bp, Homo Sapiens
agacagctgccttgtgtg

SEQ ID NO: 1085 - DNA, 18 bp, Homo Sapiens
tgccttgtgtgggactga

SEQ ID NO: 1086 - DNA, 18 bp, Homo Sapiens
ccttgtgtgggactgaga

SEQ ID NO: 1087 - DNA, 18 bp, Homo Sapiens
cttgtgtgggactgagag

SEQ ID NO: 1088 - DNA, 18 bp, Homo Sapiens
ttgtgtgggactgagagg

SEQ ID NO: 1089 - DNA, 18 bp, Homo Sapiens
tgtgggactgagaggcaa

SEQ ID NO: 1090 - DNA, 18 bp, Homo Sapiens
tgggactgagaggcaaga

SEQ ID NO: 1091 - DNA, 18 bp, Homo Sapiens
ggactgagaggcaagagt

SEQ ID NO: 1092 - DNA, 18 bp, Homo Sapiens
gactgagaggcaagagtt

SEQ ID NO: 1093 - DNA, 18 bp, Homo Sapiens
actgagaggcaagagttg

SEQ ID NO: 1094 - DNA, 18 bp, Homo Sapiens
ctgagaggcaagagttgt

SEQ ID NO: 1095 - DNA, 18 bp, Homo Sapiens
tgagaggcaagagttgtt

SEQ ID NO: 1096 - DNA, 18 bp, Homo Sapiens
gagaggcaagagttgttc

SEQ ID NO: 1097 - DNA, 18 bp, Homo Sapiens
agaggcaagagttgttcc

SEQ ID NO: 1098 - DNA, 18 bp, Homo Sapiens
gaggcaagagttgttcct

SEQ ID NO: 1099 - DNA, 18 bp, Homo Sapiens
aggcaagagttgttcctg

SEQ ID NO: 1100 - DNA, 18 bp, Homo Sapiens
ggcaagagttgttcctgc

SEQ ID NO: 1101 - DNA, 18 bp, Homo Sapiens
gcaagagttgttcctgcc

SEQ ID NO: 1102 - DNA, 18 bp, Homo Sapiens
caagagttgttcctgccc

SEQ ID NO: 1103 - DNA, 18 bp, Homo Sapiens
aagagttgttcctgccct

SEQ ID NO: 1104 - DNA, 18 bp, Homo Sapiens
agagttgttcctgccctt

SEQ ID NO: 1105 - DNA, 18 bp, Homo Sapiens
gagttgttcctgcccttc

SEQ ID NO: 1106 - DNA, 18 bp, Homo Sapiens
agttgttcctgcccttcc

SEQ ID NO: 1107 - DNA, 18 bp, Homo Sapiens
ttgttcctgcccttccct

SEQ ID NO: 1108 - DNA, 18 bp, Homo Sapiens
tgttcctgcccttccctt

SEQ ID NO: 1109 - DNA, 18 bp, Homo Sapiens
gttcctgcccttcccttt

SEQ ID NO: 1110 - DNA, 18 bp, Homo Sapiens
ttcctgcccttccctttg

SEQ ID NO: 1111 - DNA, 18 bp, Homo Sapiens
tcctgcccttccctttgt

SEQ ID NO: 1112 - DNA, 18 bp, Homo Sapiens
ctgcccttccctttgtga

SEQ ID NO: 1113 - DNA, 18 bp, Homo Sapiens
tgcccttccctttgtgac

SEQ ID NO: 1114 - DNA, 18 bp, Homo Sapiens
gcccttccctttgtgact

SEQ ID NO: 1115 - DNA, 18 bp, Homo Sapiens
cccttccctttgtgactt

SEQ ID NO: 1116 - DNA, 18 bp, Homo Sapiens
ccttccctttgtgacttg

SEQ ID NO: 1117 - DNA, 18 bp, Homo Sapiens
cttccctttgtgacttga

SEQ ID NO: 1118 - DNA, 18 bp, Homo Sapiens
ttccctttgtgacttgaa

SEQ ID NO: 1119 - DNA, 18 bp, Homo Sapiens
tccctttgtgacttgaag

SEQ ID NO: 1120 - DNA, 18 bp, Homo Sapiens
ccctttgtgacttgaaga

SEQ ID NO: 1121 - DNA, 18 bp, Homo Sapiens
cctttgtgacttgaagaa

SEQ ID NO: 1122 - DNA, 18 bp, Homo Sapiens
ctttgtgacttgaagaac

SEQ ID NO: 1123 - DNA, 18 bp, Homo Sapiens
tttgtgacttgaagaacc

SEQ ID NO: 1124 - DNA, 18 bp, Homo Sapiens
ttgtgacttgaagaaccc

SEQ ID NO: 1125 - DNA, 18 bp, Homo Sapiens
tgtgacttgaagaaccct

SEQ ID NO: 1126 - DNA, 18 bp, Homo Sapiens
gtgacttgaagaaccctg

SEQ ID NO: 1127 - DNA, 18 bp, Homo Sapiens
tgacttgaagaaccctga

SEQ ID NO: 1128 - DNA, 18 bp, Homo Sapiens
gacttgaagaaccctgac

SEQ ID NO: 1129 - DNA, 18 bp, Homo Sapiens
acttgaagaaccctgact

SEQ ID NO: 1130 - DNA, 18 bp, Homo Sapiens
cttgaagaaccctgactt

SEQ ID NO: 1131 - DNA, 18 bp, Homo Sapiens
ttgaagaaccctgacttt

SEQ ID NO: 1132 - DNA, 18 bp, Homo Sapiens
tgaagaaccctgactttg

SEQ ID NO: 1133 - DNA, 18 bp, Homo Sapiens
gaagaaccctgactttgt

SEQ ID NO: 1134 - DNA, 18 bp, Homo Sapiens
aagaaccctgactttgtt

SEQ ID NO: 1135 - DNA, 18 bp, Homo Sapiens
agaaccctgactttgttt

SEQ ID NO: 1136 - DNA, 18 bp, Homo Sapiens
gaaccctgactttgtttc

SEQ ID NO: 1137 - DNA, 18 bp, Homo Sapiens
aaccctgactttgtttct

SEQ ID NO: 1138 - DNA, 18 bp, Homo Sapiens
accctgactttgtttctg

SEQ ID NO: 1139 - DNA, 18 bp, Homo Sapiens
ccctgactttgtttctgc

SEQ ID NO: 1140 - DNA, 18 bp, Homo Sapiens
cctgactttgtttctgca

SEQ ID NO: 1141 - DNA, 18 bp, Homo Sapiens
ctgactttgtttctgcaa

SEQ ID NO: 1142 - DNA, 18 bp, Homo Sapiens
tgactttgtttctgcaaa

SEQ ID NO: 1143 - DNA, 18 bp, Homo Sapiens
gactttgtttctgcaaag

SEQ ID NO: 1144 - DNA, 18 bp, Homo Sapiens
actttgtttctgcaaagg

SEQ ID NO: 1145 - DNA, 18 bp, Homo Sapiens
ctttgtttctgcaaaggc

SEQ ID NO: 1146 - DNA, 18 bp, Homo Sapiens
tttgtttctgcaaaggca

SEQ ID NO: 1147 - DNA, 18 bp, Homo Sapiens
ttgtttctgcaaaggcac

SEQ ID NO: 1148 - DNA, 18 bp, Homo Sapiens
tgtttctgcaaaggcacc

SEQ ID NO: 1149 - DNA, 18 bp, Homo Sapiens
gtttctgcaaaggcacct

SEQ ID NO: 1150 - DNA, 18 bp, Homo Sapiens
tttctgcaaaggcacctg

SEQ ID NO: 1151 - DNA, 18 bp, Homo Sapiens
ttctgcaaaggcacctgc

SEQ ID NO: 1152 - DNA, 18 bp, Homo Sapiens
tctgcaaaggcacctgca

SEQ ID NO: 1153 - DNA, 18 bp, Homo Sapiens
ctgcaaaggcacctgcat

SEQ ID NO: 1154 - DNA, 18 bp, Homo Sapiens
tgcaaaggcacctgcatg

SEQ ID NO: 1155 - DNA, 18 bp, Homo Sapiens
gcaaaggcacctgcatgt

SEQ ID NO: 1156 - DNA, 18 bp, Homo Sapiens
caaaggcacctgcatgtg

SEQ ID NO: 1157 - DNA, 18 bp, Homo Sapiens
aaaggcacctgcatgtgt

SEQ ID NO: 1158 - DNA, 18 bp, Homo Sapiens
aaggcacctgcatgtgtc

SEQ ID NO: 1159 - DNA, 18 bp, Homo Sapiens
aggcacctgcatgtgtct

SEQ ID NO: 1160 - DNA, 18 bp, Homo Sapiens
gcacctgcatgtgtctgt

SEQ ID NO: 1161 - DNA, 18 bp, Homo Sapiens
cacctgcatgtgtctgtg

SEQ ID NO: 1162 - DNA, 18 bp, Homo Sapiens
acctgcatgtgtctgtgt

SEQ ID NO: 1163 - DNA, 18 bp, Homo Sapiens
cctgcatgtgtctgtgtt

SEQ ID NO: 1164 - DNA, 18 bp, Homo Sapiens
ctgcatgtgtctgtgttc

SEQ ID NO: 1165 - DNA, 18 bp, Homo Sapiens
tgcatgtgtctgtgttcg

SEQ ID NO: 1166 - DNA, 18 bp, Homo Sapiens
gcatgtgtctgtgttcgt

SEQ ID NO: 1167 - DNA, 18 bp, Homo Sapiens
catgtgtctgtgttcgtg

SEQ ID NO: 1168 - DNA, 18 bp, Homo Sapiens
atgtgtctgtgttcgtgt

SEQ ID NO: 1169 - DNA, 18 bp, Homo Sapiens
tgtgtctgtgttcgtgta

SEQ ID NO: 1170 - DNA, 18 bp, Homo Sapiens
gtgtctgtgttcgtgtag

SEQ ID NO: 1171 - DNA, 18 bp, Homo Sapiens
tgtctgtgttcgtgtagg

SEQ ID NO: 1172 - DNA, 18 bp, Homo Sapiens
gtctgtgttcgtgtaggc

SEQ ID NO: 1173 - DNA, 18 bp, Homo Sapiens
tctgtgttcgtgtaggca

SEQ ID NO: 1174 - DNA, 18 bp, Homo Sapiens
ctgtgttcgtgtaggcat

SEQ ID NO: 1175 - DNA, 18 bp, Homo Sapiens
tgtgttcgtgtaggcata

SEQ ID NO: 1176 - DNA, 18 bp, Homo Sapiens
gtgttcgtgtaggcataa

SEQ ID NO: 1177 - DNA, 18 bp, Homo Sapiens
tgttcgtgtaggcataat

SEQ ID NO: 1178 - DNA, 18 bp, Homo Sapiens
gttcgtgtaggcataatg

SEQ ID NO: 1179 - DNA, 18 bp, Homo Sapiens
ttcgtgtaggcataatgt

SEQ ID NO: 1180 - DNA, 18 bp, Homo Sapiens
tcgtgtaggcataatgtg

SEQ ID NO: 1181 - DNA, 18 bp, Homo Sapiens
cgtgtaggcataatgtga

SEQ ID NO: 1182 - DNA, 18 bp, Homo Sapiens
gtgtaggcataatgtgag

SEQ ID NO: 1183 - DNA, 18 bp, Homo Sapiens
tgtaggcataatgtgagg

SEQ ID NO: 1184 - DNA, 18 bp, Homo Sapiens
gtaggcataatgtgagga

SEQ ID NO: 1185 - DNA, 18 bp, Homo Sapiens
taggcataatgtgaggag

SEQ ID NO: 1186 - DNA, 18 bp, Homo Sapiens
aggcataatgtgaggagg

SEQ ID NO: 1187 - DNA, 18 bp, Homo Sapiens
ggcataatgtgaggaggt

SEQ ID NO: 1188 - DNA, 18 bp, Homo Sapiens
gcataatgtgaggaggtg

SEQ ID NO: 1189 - DNA, 18 bp, Homo Sapiens
cataatgtgaggaggtgg

SEQ ID NO: 1190 - DNA, 18 bp, Homo Sapiens
ataatgtgaggaggtggg

SEQ ID NO: 1191 - DNA, 18 bp, Homo Sapiens
catgtccaccatgaccct

SEQ ID NO: 1192 - DNA, 18 bp, Homo Sapiens
atgtccaccatgaccctc

SEQ ID NO: 1193 - DNA, 18 bp, Homo Sapiens
tgtccaccatgaccctct

SEQ ID NO: 1194 - DNA, 18 bp, Homo Sapiens
gtccaccatgaccctctt

SEQ ID NO: 1195 - DNA, 18 bp, Homo Sapiens
tccaccatgaccctcttc

SEQ ID NO: 1196 - DNA, 18 bp, Homo Sapiens
accatgaccctcttccca

SEQ ID NO: 1197 - DNA, 18 bp, Homo Sapiens
cccaatcatctttcctgt

SEQ ID NO: 1198 - DNA, 18 bp, Homo Sapiens
ccaatcatctttcctgtt

SEQ ID NO: 1199 - DNA, 18 bp, Homo Sapiens
caatcatctttcctgttc

SEQ ID NO: 1200 - DNA, 18 bp, Homo Sapiens
aatcatctttcctgttcc

SEQ ID NO: 1201 - DNA, 18 bp, Homo Sapiens
atcatctttcctgttcca

SEQ ID NO: 1202 - DNA, 18 bp, Homo Sapiens
tcatctttcctgttccag

SEQ ID NO: 1203 - DNA, 18 bp, Homo Sapiens
catctttcctgttccaga

SEQ ID NO: 1204 - DNA, 18 bp, Homo Sapiens
atctttcctgttccagag

SEQ ID NO: 1205 - DNA, 18 bp, Homo Sapiens
tctttcctgttccagaga

SEQ ID NO: 1206 - DNA, 18 bp, Homo Sapiens
ctttcctgttccagagag

SEQ ID NO: 1207 - DNA, 18 bp, Homo Sapiens
tttcctgttccagagagg

SEQ ID NO: 1208 - DNA, 18 bp, Homo Sapiens
ttcctgttccagagaggt

SEQ ID NO: 1209 - DNA, 18 bp, Homo Sapiens
tcctgttccagagaggtg

SEQ ID NO: 1210 - DNA, 18 bp, Homo Sapiens
gctgaggtgtctccatct

SEQ ID NO: 1211 - DNA, 18 bp, Homo Sapiens
ctgaggtgtctccatctc

SEQ ID NO: 1212 - DNA, 18 bp, Homo Sapiens
tgaggtgtctccatctct

SEQ ID NO: 1213 - DNA, 18 bp, Homo Sapiens
gaggtgtctccatctctg

SEQ ID NO: 1214 - DNA, 18 bp, Homo Sapiens
aggtgtctccatctctgt

SEQ ID NO: 1215 - DNA, 18 bp, Homo Sapiens
ggtgtctccatctctgtc

SEQ ID NO: 1216 - DNA, 18 bp, Homo Sapiens
gtgtctccatctctgtct

SEQ ID NO: 1217 - DNA, 18 bp, Homo Sapiens
tgtctccatctctgtctc

SEQ ID NO: 1218 - DNA, 18 bp, Homo Sapiens
gtctccatctctgtctca

SEQ ID NO: 1219 - DNA, 18 bp, Homo Sapiens
tctccatctctgtctcaa

SEQ ID NO: 1220 - DNA, 18 bp, Homo Sapiens
ctccatctctgtctcaac

SEQ ID NO: 1221 - DNA, 18 bp, Homo Sapiens
tccatctctgtctcaact

SEQ ID NO: 1222 - DNA, 18 bp, Homo Sapiens
ccatctctgtctcaactt

SEQ ID NO: 1223 - DNA, 18 bp, Homo Sapiens
catctctgtctcaacttc

SEQ ID NO: 1224 - DNA, 18 bp, Homo Sapiens
atctctgtctcaacttca

SEQ ID NO: 1225 - DNA, 18 bp, Homo Sapiens
tctctgtctcaacttcat

SEQ ID NO: 1226 - DNA, 18 bp, Homo Sapiens
ctctgtctcaacttcatg

SEQ ID NO: 1227 - DNA, 18 bp, Homo Sapiens
tctgtctcaacttcatgg

SEQ ID NO: 1228 - DNA, 18 bp, Homo Sapiens
ctgtctcaacttcatggt

SEQ ID NO: 1229 - DNA, 18 bp, Homo Sapiens
tgtctcaacttcatggtg

SEQ ID NO: 1230 - DNA, 18 bp, Homo Sapiens
gtctcaacttcatggtgc

SEQ ID NO: 1231 - DNA, 18 bp, Homo Sapiens
tctcaacttcatggtgca

SEQ ID NO: 1232 - DNA, 18 bp, Homo Sapiens
ctcaacttcatggtgcac

SEQ ID NO: 1233 - DNA, 18 bp, Homo Sapiens
tcaacttcatggtgcact

SEQ ID NO: 1234 - DNA, 18 bp, Homo Sapiens
caacttcatggtgcactg

SEQ ID NO: 1235 - DNA, 18 bp, Homo Sapiens
aacttcatggtgcactga

SEQ ID NO: 1236 - DNA, 18 bp, Homo Sapiens
acttcatggtgcactgag

SEQ ID NO: 1237 - DNA, 18 bp, Homo Sapiens
cttcatggtgcactgagc

SEQ ID NO: 1238 - DNA, 18 bp, Homo Sapiens
ttcatggtgcactgagct

SEQ ID NO: 1239 - DNA, 18 bp, Homo Sapiens
tcatggtgcactgagctg

SEQ ID NO: 1240 - DNA, 18 bp, Homo Sapiens
catggtgcactgagctgt

SEQ ID NO: 1241 - DNA, 18 bp, Homo Sapiens
atggtgcactgagctgta

SEQ ID NO: 1242 - DNA, 18 bp, Homo Sapiens
tggtgcactgagctgtaa

SEQ ID NO: 1243 - DNA, 18 bp, Homo Sapiens
ggtgcactgagctgtaac

SEQ ID NO: 1244 - DNA, 18 bp, Homo Sapiens
gtgcactgagctgtaact

SEQ ID NO: 1245 - DNA, 18 bp, Homo Sapiens
tgcactgagctgtaactt

SEQ ID NO: 1246 - DNA, 18 bp, Homo Sapiens
gcactgagctgtaacttc

SEQ ID NO: 1247 - DNA, 18 bp, Homo Sapiens
cactgagctgtaacttct

SEQ ID NO: 1248 - DNA, 18 bp, Homo Sapiens
actgagctgtaacttctt

SEQ ID NO: 1249 - DNA, 18 bp, Homo Sapiens
ctgagctgtaacttcttc

SEQ ID NO: 1250 - DNA, 18 bp, Homo Sapiens
tgagctgtaacttcttcc

SEQ ID NO: 1251 - DNA, 18 bp, Homo Sapiens
gagctgtaacttcttcct

SEQ ID NO: 1252 - DNA, 18 bp, Homo Sapiens
agctgtaacttcttcctt

SEQ ID NO: 1253 - DNA, 18 bp, Homo Sapiens
gctgtaacttcttccttc

SEQ ID NO: 1254 - DNA, 18 bp, Homo Sapiens
ctgtaacttcttccttcc

SEQ ID NO: 1255 - DNA, 18 bp, Homo Sapiens
tgtaacttcttccttccc

SEQ ID NO: 1256 - DNA, 18 bp, Homo Sapiens
gtaacttcttccttccct

SEQ ID NO: 1257 - DNA, 18 bp, Homo Sapiens
taacttcttccttcccta

SEQ ID NO: 1258 - DNA, 18 bp, Homo Sapiens
aacttcttccttccctat

SEQ ID NO: 1259 - DNA, 18 bp, Homo Sapiens
acttcttccttccctatt

SEQ ID NO: 1260 - DNA, 18 bp, Homo Sapiens
cttcttccttccctatta

SEQ ID NO: 1261 - DNA, 18 bp, Homo Sapiens
ttcttccttccctattaa

SEQ ID NO: 1262 - DNA, 18 bp, Homo Sapiens
tcttccttccctattaaa

SEQ ID NO: 1263 - DNA, 19 bp, Homo Sapiens
ccgaaggcggtgtatggat

SEQ ID NO: 1264 - DNA, 19 bp, Homo Sapiens
cgaaggcggtgtatggatt

SEQ ID NO: 1265 - DNA, 19 bp, Homo Sapiens
gaaggcggtgtatggattg

SEQ ID NO: 1266 - DNA, 19 bp, Homo Sapiens
aaggcggtgtatggattgg

SEQ ID NO: 1267 - DNA, 19 bp, Homo Sapiens
aggcggtgtatggattggg

SEQ ID NO: 1268 - DNA, 19 bp, Homo Sapiens
cccaactccgcagtttctt

SEQ ID NO: 1269 - DNA, 19 bp, Homo Sapiens
ccaactccgcagtttcttt

SEQ ID NO: 1270 - DNA, 19 bp, Homo Sapiens
tttctccctctcccaacct

SEQ ID NO: 1271 - DNA, 19 bp, Homo Sapiens
ttctccctctcccaaccta

SEQ ID NO: 1272 - DNA, 19 bp, Homo Sapiens
tctccctctcccaacctat

SEQ ID NO: 1273 - DNA, 19 bp, Homo Sapiens
ctccctctcccaacctatg

SEQ ID NO: 1274 - DNA, 19 bp, Homo Sapiens
tccctctcccaacctatgt

SEQ ID NO: 1275 - DNA, 19 bp, Homo Sapiens
ccctctcccaacctatgta

SEQ ID NO: 1276 - DNA, 19 bp, Homo Sapiens
cctctcccaacctatgtag

SEQ ID NO: 1277 - DNA, 19 bp, Homo Sapiens
ctctcccaacctatgtagg

SEQ ID NO: 1278 - DNA, 19 bp, Homo Sapiens
tctcccaacctatgtaggg

SEQ ID NO: 1279 - DNA, 19 bp, Homo Sapiens
ctcccaacctatgtagggt

SEQ ID NO: 1280 - DNA, 19 bp, Homo Sapiens
tcccaacctatgtagggtc

SEQ ID NO: 1281 - DNA, 19 bp, Homo Sapiens
cccaacctatgtagggtcc

SEQ ID NO: 1282 - DNA, 19 bp, Homo Sapiens
ccaacctatgtagggtcct

SEQ ID NO: 1283 - DNA, 19 bp, Homo Sapiens
caacctatgtagggtcctt

SEQ ID NO: 1284 - DNA, 19 bp, Homo Sapiens
aacctatgtagggtccttc

SEQ ID NO: 1285 - DNA, 19 bp, Homo Sapiens
acctatgtagggtccttct

SEQ ID NO: 1286 - DNA, 19 bp, Homo Sapiens
cctatgtagggtccttctt

SEQ ID NO: 1287 - DNA, 19 bp, Homo Sapiens
ctatgtagggtccttcttc

SEQ ID NO: 1288 - DNA, 19 bp, Homo Sapiens
tatgtagggtccttcttcc

SEQ ID NO: 1289 - DNA, 19 bp, Homo Sapiens
atgtagggtccttcttcct

SEQ ID NO: 1290 - DNA, 19 bp, Homo Sapiens
tgtagggtccttcttcctg

SEQ ID NO: 1291 - DNA, 19 bp, Homo Sapiens
gtagggtccttcttcctgg

SEQ ID NO: 1292 - DNA, 19 bp, Homo Sapiens
tagggtccttcttcctgga

SEQ ID NO: 1293 - DNA, 19 bp, Homo Sapiens
agggtccttcttcctggat

SEQ ID NO: 1294 - DNA, 19 bp, Homo Sapiens
gggtccttcttcctggata

SEQ ID NO: 1295 - DNA, 19 bp, Homo Sapiens
ggtccttcttcctggatac

SEQ ID NO: 1296 - DNA, 19 bp, Homo Sapiens
gtccttcttcctggatact

SEQ ID NO: 1297 - DNA, 19 bp, Homo Sapiens
tccttcttcctggatactc

SEQ ID NO: 1298 - DNA, 19 bp, Homo Sapiens
ccttcttcctggatactca

SEQ ID NO: 1299 - DNA, 19 bp, Homo Sapiens
cttcttcctggatactcac

SEQ ID NO: 1300 - DNA, 19 bp, Homo Sapiens
ttcttcctggatactcacg

SEQ ID NO: 1301 - DNA, 19 bp, Homo Sapiens
tcttcctggatactcacga

SEQ ID NO: 1302 - DNA, 19 bp, Homo Sapiens
cttcctggatactcacgac

SEQ ID NO: 1303 - DNA, 19 bp, Homo Sapiens
ttcctggatactcacgacg

SEQ ID NO: 1304 - DNA, 19 bp, Homo Sapiens
tcctggatactcacgacgc

SEQ ID NO: 1305 - DNA, 19 bp, Homo Sapiens
tggatactcacgacgcgga

SEQ ID NO: 1306 - DNA, 19 bp, Homo Sapiens
gacccagttctcactccca

SEQ ID NO: 1307 - DNA, 19 bp, Homo Sapiens
acccagttctcactcccat

SEQ ID NO: 1308 - DNA, 19 bp, Homo Sapiens
cccagttctcactcccatt

SEQ ID NO: 1309 - DNA, 19 bp, Homo Sapiens
ccagttctcactcccattg

SEQ ID NO: 1310 - DNA, 19 bp, Homo Sapiens
cagttctcactcccattgg

SEQ ID NO: 1311 - DNA, 19 bp, Homo Sapiens
agttctcactcccattggg

SEQ ID NO: 1312 - DNA, 19 bp, Homo Sapiens
gttctcactcccattgggt

SEQ ID NO: 1313 - DNA, 19 bp, Homo Sapiens
ttctcactcccattgggtg

SEQ ID NO: 1314 - DNA, 19 bp, Homo Sapiens
tctcactcccattgggtgt

SEQ ID NO: 1315 - DNA, 19 bp, Homo Sapiens
ctcactcccattgggtgtc

SEQ ID NO: 1316 - DNA, 19 bp, Homo Sapiens
tcactcccattgggtgtcg

SEQ ID NO: 1317 - DNA, 19 bp, Homo Sapiens
tcccattgggtgtcgggtt

SEQ ID NO: 1318 - DNA, 19 bp, Homo Sapiens
cccattgggtgtcgggttt

SEQ ID NO: 1319 - DNA, 19 bp, Homo Sapiens
ccattgggtgtcgggtttc

SEQ ID NO: 1320 - DNA, 19 bp, Homo Sapiens
cattgggtgtcgggtttcc

SEQ ID NO: 1321 - DNA, 19 bp, Homo Sapiens
attgggtgtcgggtttcca

SEQ ID NO: 1322 - DNA, 19 bp, Homo Sapiens
ttgggtgtcgggtttccag

SEQ ID NO: 1323 - DNA, 19 bp, Homo Sapiens
tgggtgtcgggtttccaga

SEQ ID NO: 1324 - DNA, 19 bp, Homo Sapiens
ggtgtcgggtttccagaga

SEQ ID NO: 1325 - DNA, 19 bp, Homo Sapiens
gtgtcgggtttccagagaa

SEQ ID NO: 1326 - DNA, 19 bp, Homo Sapiens
tgtcgggtttccagagaag

SEQ ID NO: 1327 - DNA, 19 bp, Homo Sapiens
gtcgggtttccagagaagc

SEQ ID NO: 1328 - DNA, 19 bp, Homo Sapiens
tcgggtttccagagaagcc

SEQ ID NO: 1329 - DNA, 19 bp, Homo Sapiens
cgggtttccagagaagcca

SEQ ID NO: 1330 - DNA, 19 bp, Homo Sapiens
gggtttccagagaagccaa

SEQ ID NO: 1331 - DNA, 19 bp, Homo Sapiens
ggtttccagagaagccaat

SEQ ID NO: 1332 - DNA, 19 bp, Homo Sapiens
gtttccagagaagccaatc

SEQ ID NO: 1333 - DNA, 19 bp, Homo Sapiens
tttccagagaagccaatca

SEQ ID NO: 1334 - DNA, 19 bp, Homo Sapiens
ttccagagaagccaatcag

SEQ ID NO: 1335 - DNA, 19 bp, Homo Sapiens
tccagagaagccaatcagt

SEQ ID NO: 1336 - DNA, 19 bp, Homo Sapiens
ccagagaagccaatcagtg

SEQ ID NO: 1337 - DNA, 19 bp, Homo Sapiens
cagagaagccaatcagtgt

SEQ ID NO: 1338 - DNA, 19 bp, Homo Sapiens
agagaagccaatcagtgtc

SEQ ID NO: 1339 - DNA, 19 bp, Homo Sapiens
gagaagccaatcagtgtcg

SEQ ID NO: 1340 - DNA, 19 bp, Homo Sapiens
agaagccaatcagtgtcgt

SEQ ID NO: 1341 - DNA, 19 bp, Homo Sapiens
gaagccaatcagtgtcgtc

SEQ ID NO: 1342 - DNA, 19 bp, Homo Sapiens
aagccaatcagtgtcgtcg

SEQ ID NO: 1343 - DNA, 19 bp, Homo Sapiens
agccaatcagtgtcgtcgc

SEQ ID NO: 1344 - DNA, 19 bp, Homo Sapiens
caatcagtgtcgtcgcggt

SEQ ID NO: 1345 - DNA, 19 bp, Homo Sapiens
aatcagtgtcgtcgcggtc

SEQ ID NO: 1346 - DNA, 19 bp, Homo Sapiens
tcgcggtcgcggttctaaa

SEQ ID NO: 1347 - DNA, 19 bp, Homo Sapiens
gcggtcgcggttctaaagt

SEQ ID NO: 1348 - DNA, 19 bp, Homo Sapiens
cggtcgcggttctaaagtc

SEQ ID NO: 1349 - DNA, 19 bp, Homo Sapiens
ggtcgcggttctaaagtcc

SEQ ID NO: 1350 - DNA, 19 bp, Homo Sapiens
gtcgcggttctaaagtccg

SEQ ID NO: 1351 - DNA, 19 bp, Homo Sapiens
tcgcggttctaaagtccgc

SEQ ID NO: 1352 - DNA, 19 bp, Homo Sapiens
cgcggttctaaagtccgca

SEQ ID NO: 1353 - DNA, 19 bp, Homo Sapiens
gcggttctaaagtccgcac

SEQ ID NO: 1354 - DNA, 19 bp, Homo Sapiens
cggttctaaagtccgcacg

SEQ ID NO: 1355 - DNA, 19 bp, Homo Sapiens
ggttctaaagtccgcacgc

SEQ ID NO: 1356 - DNA, 19 bp, Homo Sapiens
gttctaaagtccgcacgca

SEQ ID NO: 1357 - DNA, 19 bp, Homo Sapiens
ttctaaagtccgcacgcac

SEQ ID NO: 1358 - DNA, 19 bp, Homo Sapiens
tctaaagtccgcacgcacc

SEQ ID NO: 1359 - DNA, 19 bp, Homo Sapiens
taaagtccgcacgcaccca

SEQ ID NO: 1360 - DNA, 19 bp, Homo Sapiens
acccaccgggactcagatt

SEQ ID NO: 1361 - DNA, 19 bp, Homo Sapiens
ccaccgggactcagattct

SEQ ID NO: 1362 - DNA, 19 bp, Homo Sapiens
caccgggactcagattctc

SEQ ID NO: 1363 - DNA, 19 bp, Homo Sapiens
accgggactcagattctcc

SEQ ID NO: 1364 - DNA, 19 bp, Homo Sapiens
gaaccctcgtcctgctact

SEQ ID NO: 1365 - DNA, 19 bp, Homo Sapiens
aaccctcgtcctgctactc

SEQ ID NO: 1366 - DNA, 19 bp, Homo Sapiens
accctcgtcctgctactct

SEQ ID NO: 1367 - DNA, 19 bp, Homo Sapiens
ggctctcactccatgaggt

SEQ ID NO: 1368 - DNA, 19 bp, Homo Sapiens
gctctcactccatgaggta

SEQ ID NO: 1369 - DNA, 19 bp, Homo Sapiens
ctctcactccatgaggtat

SEQ ID NO: 1370 - DNA, 19 bp, Homo Sapiens
tctcactccatgaggtatt

SEQ ID NO: 1371 - DNA, 19 bp, Homo Sapiens
ctcactccatgaggtattt

SEQ ID NO: 1372 - DNA, 19 bp, Homo Sapiens
tcactccatgaggtatttc

SEQ ID NO: 1373 - DNA, 19 bp, Homo Sapiens
cactccatgaggtatttct

SEQ ID NO: 1374 - DNA, 19 bp, Homo Sapiens
actccatgaggtatttctt

SEQ ID NO: 1375 - DNA, 19 bp, Homo Sapiens
ctccatgaggtatttcttc

SEQ ID NO: 1376 - DNA, 19 bp, Homo Sapiens
tccatgaggtatttcttca

SEQ ID NO: 1377 - DNA, 19 bp, Homo Sapiens
ccatgaggtatttcttcac

SEQ ID NO: 1378 - DNA, 19 bp, Homo Sapiens
catgaggtatttcttcaca

SEQ ID NO: 1379 - DNA, 19 bp, Homo Sapiens
atgaggtatttcttcacat

SEQ ID NO: 1380 - DNA, 19 bp, Homo Sapiens
tgaggtatttcttcacatc

SEQ ID NO: 1381 - DNA, 19 bp, Homo Sapiens
gaggtatttcttcacatcc

SEQ ID NO: 1382 - DNA, 19 bp, Homo Sapiens
aggtatttcttcacatccg

SEQ ID NO: 1383 - DNA, 19 bp, Homo Sapiens
ggtatttcttcacatccgt

SEQ ID NO: 1384 - DNA, 19 bp, Homo Sapiens
gtatttcttcacatccgtg

SEQ ID NO: 1385 - DNA, 19 bp, Homo Sapiens
tatttcttcacatccgtgt

SEQ ID NO: 1386 - DNA, 19 bp, Homo Sapiens
atttcttcacatccgtgtc

SEQ ID NO: 1387 - DNA, 19 bp, Homo Sapiens
tttcttcacatccgtgtcc

SEQ ID NO: 1388 - DNA, 19 bp, Homo Sapiens
ttcttcacatccgtgtccc

SEQ ID NO: 1389 - DNA, 19 bp, Homo Sapiens
tcttcacatccgtgtcccg

SEQ ID NO: 1390 - DNA, 19 bp, Homo Sapiens
gcttcatcgcagtgggcta

SEQ ID NO: 1391 - DNA, 19 bp, Homo Sapiens
cttcatcgcagtgggctac

SEQ ID NO: 1392 - DNA, 19 bp, Homo Sapiens
ttcatcgcagtgggctacg

SEQ ID NO: 1393 - DNA, 19 bp, Homo Sapiens
tcatcgcagtgggctacgt

SEQ ID NO: 1394 - DNA, 19 bp, Homo Sapiens
tacgtggacgacacgcagt

SEQ ID NO: 1395 - DNA, 19 bp, Homo Sapiens
acgtggacgacacgcagtt

SEQ ID NO: 1396 - DNA, 19 bp, Homo Sapiens
tggacgacacgcagttcgt

SEQ ID NO: 1397 - DNA, 19 bp, Homo Sapiens
acacgcagttcgtgcggtt

SEQ ID NO: 1398 - DNA, 19 bp, Homo Sapiens
cagttcgtgcggttcgaca

SEQ ID NO: 1399 - DNA, 19 bp, Homo Sapiens
agttcgtgcggttcgacag

SEQ ID NO: 1400 - DNA, 19 bp, Homo Sapiens
gtggatagagcaggagggt

SEQ ID NO: 1401 - DNA, 19 bp, Homo Sapiens
tggatagagcaggagggtc

SEQ ID NO: 1402 - DNA, 19 bp, Homo Sapiens
caggagggtccggagtatt

SEQ ID NO: 1403 - DNA, 19 bp, Homo Sapiens
aggagggtccggagtattg

SEQ ID NO: 1404 - DNA, 19 bp, Homo Sapiens
agggtccggagtattggga

SEQ ID NO: 1405 - DNA, 19 bp, Homo Sapiens
ggagacacggaaagtgaag

SEQ ID NO: 1406 - DNA, 19 bp, Homo Sapiens
gagacacggaaagtgaagg

SEQ ID NO: 1407 - DNA, 19 bp, Homo Sapiens
agacacggaaagtgaaggc

SEQ ID NO: 1408 - DNA, 19 bp, Homo Sapiens
gacacggaaagtgaaggcc

SEQ ID NO: 1409 - DNA, 19 bp, Homo Sapiens
acacggaaagtgaaggccc

SEQ ID NO: 1410 - DNA, 19 bp, Homo Sapiens
cacggaaagtgaaggccca

SEQ ID NO: 1411 - DNA, 19 bp, Homo Sapiens
acggaaagtgaaggcccac

SEQ ID NO: 1412 - DNA, 19 bp, Homo Sapiens
cggaaagtgaaggcccact

SEQ ID NO: 1413 - DNA, 19 bp, Homo Sapiens
ggaaagtgaaggcccactc

SEQ ID NO: 1414 - DNA, 19 bp, Homo Sapiens
aaagtgaaggcccactcac

SEQ ID NO: 1415 - DNA, 19 bp, Homo Sapiens
aagtgaaggcccactcaca

SEQ ID NO: 1416 - DNA, 19 bp, Homo Sapiens
agtgaaggcccactcacag

SEQ ID NO: 1417 - DNA, 19 bp, Homo Sapiens
gtgaaggcccactcacaga

SEQ ID NO: 1418 - DNA, 19 bp, Homo Sapiens
tgaaggcccactcacagac

SEQ ID NO: 1419 - DNA, 19 bp, Homo Sapiens
gaaggcccactcacagact

SEQ ID NO: 1420 - DNA, 19 bp, Homo Sapiens
aaggcccactcacagactc

SEQ ID NO: 1421 - DNA, 19 bp, Homo Sapiens
aggcccactcacagactca

SEQ ID NO: 1422 - DNA, 19 bp, Homo Sapiens
ccactcacagactcaccga

SEQ ID NO: 1423 - DNA, 19 bp, Homo Sapiens
cactcacagactcaccgag

SEQ ID NO: 1424 - DNA, 19 bp, Homo Sapiens
actcacagactcaccgagt

SEQ ID NO: 1425 - DNA, 19 bp, Homo Sapiens
ctcacagactcaccgagtg

SEQ ID NO: 1426 - DNA, 19 bp, Homo Sapiens
tcacagactcaccgagtgg

SEQ ID NO: 1427 - DNA, 19 bp, Homo Sapiens
cacagactcaccgagtgga

SEQ ID NO: 1428 - DNA, 19 bp, Homo Sapiens
acagactcaccgagtggac

SEQ ID NO: 1429 - DNA, 19 bp, Homo Sapiens
agactcaccgagtggacct

SEQ ID NO: 1430 - DNA, 19 bp, Homo Sapiens
cgcggctactacaaccaga

SEQ ID NO: 1431 - DNA, 19 bp, Homo Sapiens
gcggctactacaaccagag

SEQ ID NO: 1432 - DNA, 19 bp, Homo Sapiens
cggctactacaaccagagc

SEQ ID NO: 1433 - DNA, 19 bp, Homo Sapiens
ggctactacaaccagagcg

SEQ ID NO: 1434 - DNA, 19 bp, Homo Sapiens
gctactacaaccagagcga

SEQ ID NO: 1435 - DNA, 19 bp, Homo Sapiens
ctactacaaccagagcgag

SEQ ID NO: 1436 - DNA, 19 bp, Homo Sapiens
tactacaaccagagcgagg

SEQ ID NO: 1437 - DNA, 19 bp, Homo Sapiens
actacaaccagagcgaggc

SEQ ID NO: 1438 - DNA, 19 bp, Homo Sapiens
ggttctcacaccgtccaga

SEQ ID NO: 1439 - DNA, 19 bp, Homo Sapiens
gttctcacaccgtccagag

SEQ ID NO: 1440 - DNA, 19 bp, Homo Sapiens
ttctcacaccgtccagagg

SEQ ID NO: 1441 - DNA, 19 bp, Homo Sapiens
tctcacaccgtccagagga

SEQ ID NO: 1442 - DNA, 19 bp, Homo Sapiens
ctcacaccgtccagaggat

SEQ ID NO: 1443 - DNA, 19 bp, Homo Sapiens
tcacaccgtccagaggatg

SEQ ID NO: 1444 - DNA, 19 bp, Homo Sapiens
cacaccgtccagaggatgt

SEQ ID NO: 1445 - DNA, 19 bp, Homo Sapiens
acaccgtccagaggatgta

SEQ ID NO: 1446 - DNA, 19 bp, Homo Sapiens
caccgtccagaggatgtat

SEQ ID NO: 1447 - DNA, 19 bp, Homo Sapiens
accgtccagaggatgtatg

SEQ ID NO: 1448 - DNA, 19 bp, Homo Sapiens
ccgtccagaggatgtatgg

SEQ ID NO: 1449 - DNA, 19 bp, Homo Sapiens
cgtccagaggatgtatggc

SEQ ID NO: 1450 - DNA, 19 bp, Homo Sapiens
gtccagaggatgtatggct

SEQ ID NO: 1451 - DNA, 19 bp, Homo Sapiens
tccagaggatgtatggctg

SEQ ID NO: 1452 - DNA, 19 bp, Homo Sapiens
ccagaggatgtatggctgc

SEQ ID NO: 1453 - DNA, 19 bp, Homo Sapiens
cagaggatgtatggctgcg

SEQ ID NO: 1454 - DNA, 19 bp, Homo Sapiens
agaggatgtatggctgcga

SEQ ID NO: 1455 - DNA, 19 bp, Homo Sapiens
gaggatgtatggctgcgac

SEQ ID NO: 1456 - DNA, 19 bp, Homo Sapiens
aggatgtatggctgcgacg

SEQ ID NO: 1457 - DNA, 19 bp, Homo Sapiens
ggatgtatggctgcgacgt

SEQ ID NO: 1458 - DNA, 19 bp, Homo Sapiens
gatgtatggctgcgacgtg

SEQ ID NO: 1459 - DNA, 19 bp, Homo Sapiens
atgtatggctgcgacgtgg

SEQ ID NO: 1460 - DNA, 19 bp, Homo Sapiens
ggtaccaccagtacgccta

SEQ ID NO: 1461 - DNA, 19 bp, Homo Sapiens
gtaccaccagtacgcctac

SEQ ID NO: 1462 - DNA, 19 bp, Homo Sapiens
taccaccagtacgcctacg

SEQ ID NO: 1463 - DNA, 19 bp, Homo Sapiens
accaccagtacgcctacga

SEQ ID NO: 1464 - DNA, 19 bp, Homo Sapiens
agtacgcctacgacggcaa

SEQ ID NO: 1465 - DNA, 19 bp, Homo Sapiens
gcctacgacggcaaggatt

SEQ ID NO: 1466 - DNA, 19 bp, Homo Sapiens
cctacgacggcaaggatta

SEQ ID NO: 1467 - DNA, 19 bp, Homo Sapiens
ctacgacggcaaggattac

SEQ ID NO: 1468 - DNA, 19 bp, Homo Sapiens
tacgacggcaaggattaca

SEQ ID NO: 1469 - DNA, 19 bp, Homo Sapiens
acgacggcaaggattacat

SEQ ID NO: 1470 - DNA, 19 bp, Homo Sapiens
cgacggcaaggattacatc

SEQ ID NO: 1471 - DNA, 19 bp, Homo Sapiens
gacggcaaggattacatcg

SEQ ID NO: 1472 - DNA, 19 bp, Homo Sapiens
acggcaaggattacatcgc

SEQ ID NO: 1473 - DNA, 19 bp, Homo Sapiens
cggcaaggattacatcgcc

SEQ ID NO: 1474 - DNA, 19 bp, Homo Sapiens
ggcaaggattacatcgccc

SEQ ID NO: 1475 - DNA, 19 bp, Homo Sapiens
gcaaggattacatcgccct

SEQ ID NO: 1476 - DNA, 19 bp, Homo Sapiens
caaggattacatcgccctg

SEQ ID NO: 1477 - DNA, 19 bp, Homo Sapiens
aaggattacatcgccctga

SEQ ID NO: 1478 - DNA, 19 bp, Homo Sapiens
aggattacatcgccctgaa

SEQ ID NO: 1479 - DNA, 19 bp, Homo Sapiens
ggattacatcgccctgaaa

SEQ ID NO: 1480 - DNA, 19 bp, Homo Sapiens
gattacatcgccctgaaag

SEQ ID NO: 1481 - DNA, 19 bp, Homo Sapiens
attacatcgccctgaaaga

SEQ ID NO: 1482 - DNA, 19 bp, Homo Sapiens
ttacatcgccctgaaagag

SEQ ID NO: 1483 - DNA, 19 bp, Homo Sapiens
tacatcgccctgaaagagg

SEQ ID NO: 1484 - DNA, 19 bp, Homo Sapiens
acatcgccctgaaagagga

SEQ ID NO: 1485 - DNA, 19 bp, Homo Sapiens
catcgccctgaaagaggac

SEQ ID NO: 1486 - DNA, 19 bp, Homo Sapiens
atcgccctgaaagaggacc

SEQ ID NO: 1487 - DNA, 19 bp, Homo Sapiens
tcgccctgaaagaggacct

SEQ ID NO: 1488 - DNA, 19 bp, Homo Sapiens
ctgaaagaggacctgcgct

SEQ ID NO: 1489 - DNA, 19 bp, Homo Sapiens
tgaaagaggacctgcgctc

SEQ ID NO: 1490 - DNA, 19 bp, Homo Sapiens
gaaagaggacctgcgctct

SEQ ID NO: 1491 - DNA, 19 bp, Homo Sapiens
aaagaggacctgcgctctt

SEQ ID NO: 1492 - DNA, 19 bp, Homo Sapiens
aagaggacctgcgctcttg

SEQ ID NO: 1493 - DNA, 19 bp, Homo Sapiens
gacatggcagctcagacca

SEQ ID NO: 1494 - DNA, 19 bp, Homo Sapiens
acatggcagctcagaccac

SEQ ID NO: 1495 - DNA, 19 bp, Homo Sapiens
atggcagctcagaccacca

SEQ ID NO: 1496 - DNA, 19 bp, Homo Sapiens
tggcagctcagaccaccaa

SEQ ID NO: 1497 - DNA, 19 bp, Homo Sapiens
cagctcagaccaccaagca

SEQ ID NO: 1498 - DNA, 19 bp, Homo Sapiens
agctcagaccaccaagcac

SEQ ID NO: 1499 - DNA, 19 bp, Homo Sapiens
gctcagaccaccaagcaca

SEQ ID NO: 1500 - DNA, 19 bp, Homo Sapiens
ctcagaccaccaagcacaa

SEQ ID NO: 1501 - DNA, 19 bp, Homo Sapiens
tcagaccaccaagcacaag

SEQ ID NO: 1502 - DNA, 19 bp, Homo Sapiens
cagaccaccaagcacaagt

SEQ ID NO: 1503 - DNA, 19 bp, Homo Sapiens
agaccaccaagcacaagtg

SEQ ID NO: 1504 - DNA, 19 bp, Homo Sapiens
gaccaccaagcacaagtgg

SEQ ID NO: 1505 - DNA, 19 bp, Homo Sapiens
accaccaagcacaagtggg

SEQ ID NO: 1506 - DNA, 19 bp, Homo Sapiens
ccaccaagcacaagtggga

SEQ ID NO: 1507 - DNA, 19 bp, Homo Sapiens
caccaagcacaagtgggag

SEQ ID NO: 1508 - DNA, 19 bp, Homo Sapiens
accaagcacaagtgggagg

SEQ ID NO: 1509 - DNA, 19 bp, Homo Sapiens
catgtggcggagcagttga

SEQ ID NO: 1510 - DNA, 19 bp, Homo Sapiens
atgtggcggagcagttgag

SEQ ID NO: 1511 - DNA, 19 bp, Homo Sapiens
tgtggcggagcagttgaga

SEQ ID NO: 1512 - DNA, 19 bp, Homo Sapiens
cggagcagttgagagccta

SEQ ID NO: 1513 - DNA, 19 bp, Homo Sapiens
ggagcagttgagagcctac

SEQ ID NO: 1514 - DNA, 19 bp, Homo Sapiens
gagcagttgagagcctacc

SEQ ID NO: 1515 - DNA, 19 bp, Homo Sapiens
agcagttgagagcctacct

SEQ ID NO: 1516 - DNA, 19 bp, Homo Sapiens
gcagttgagagcctacctg

SEQ ID NO: 1517 - DNA, 19 bp, Homo Sapiens
cagttgagagcctacctgg

SEQ ID NO: 1518 - DNA, 19 bp, Homo Sapiens
agttgagagcctacctgga

SEQ ID NO: 1519 - DNA, 19 bp, Homo Sapiens
gttgagagcctacctggag

SEQ ID NO: 1520 - DNA, 19 bp, Homo Sapiens
ttgagagcctacctggagg

SEQ ID NO: 1521 - DNA, 19 bp, Homo Sapiens
tggagtggctccgcagata

SEQ ID NO: 1522 - DNA, 19 bp, Homo Sapiens
agtggctccgcagatacct

SEQ ID NO: 1523 - DNA, 19 bp, Homo Sapiens
ctccgcagatacctggaga

SEQ ID NO: 1524 - DNA, 19 bp, Homo Sapiens
tccgcagatacctggagaa

SEQ ID NO: 1525 - DNA, 19 bp, Homo Sapiens
ccgcagatacctggagaac

SEQ ID NO: 1526 - DNA, 19 bp, Homo Sapiens
cgcagatacctggagaacg

SEQ ID NO: 1527 - DNA, 19 bp, Homo Sapiens
gcagatacctggagaacgg

SEQ ID NO: 1528 - DNA, 19 bp, Homo Sapiens
cagatacctggagaacggg

SEQ ID NO: 1529 - DNA, 19 bp, Homo Sapiens
agatacctggagaacggga

SEQ ID NO: 1530 - DNA, 19 bp, Homo Sapiens
gatacctggagaacgggaa

SEQ ID NO: 1531 - DNA, 19 bp, Homo Sapiens
atacctggagaacgggaag

SEQ ID NO: 1532 - DNA, 19 bp, Homo Sapiens
tacctggagaacgggaagg

SEQ ID NO: 1533 - DNA, 19 bp, Homo Sapiens
acctggagaacgggaagga

SEQ ID NO: 1534 - DNA, 19 bp, Homo Sapiens
ctggagaacgggaaggaga

SEQ ID NO: 1535 - DNA, 19 bp, Homo Sapiens
tggagaacgggaaggagac

SEQ ID NO: 1536 - DNA, 19 bp, Homo Sapiens
agaacgggaaggagacgct

SEQ ID NO: 1537 - DNA, 19 bp, Homo Sapiens
aaacgcatatgactcacca

SEQ ID NO: 1538 - DNA, 19 bp, Homo Sapiens
aacgcatatgactcaccac

SEQ ID NO: 1539 - DNA, 19 bp, Homo Sapiens
cgcatatgactcaccacgc

SEQ ID NO: 1540 - DNA, 19 bp, Homo Sapiens
gcatatgactcaccacgct

SEQ ID NO: 1541 - DNA, 19 bp, Homo Sapiens
catatgactcaccacgctg

SEQ ID NO: 1542 - DNA, 19 bp, Homo Sapiens
atatgactcaccacgctgt

SEQ ID NO: 1543 - DNA, 19 bp, Homo Sapiens
tatgactcaccacgctgtc

SEQ ID NO: 1544 - DNA, 19 bp, Homo Sapiens
atgactcaccacgctgtct

SEQ ID NO: 1545 - DNA, 19 bp, Homo Sapiens
tgactcaccacgctgtctc

SEQ ID NO: 1546 - DNA, 19 bp, Homo Sapiens
gactcaccacgctgtctct

SEQ ID NO: 1547 - DNA, 19 bp, Homo Sapiens
actcaccacgctgtctctg

SEQ ID NO: 1548 - DNA, 19 bp, Homo Sapiens
ctcaccacgctgtctctga

SEQ ID NO: 1549 - DNA, 19 bp, Homo Sapiens
tcaccacgctgtctctgac

SEQ ID NO: 1550 - DNA, 19 bp, Homo Sapiens
accacgctgtctctgacca

SEQ ID NO: 1551 - DNA, 19 bp, Homo Sapiens
ccacgctgtctctgaccat

SEQ ID NO: 1552 - DNA, 19 bp, Homo Sapiens
cacgctgtctctgaccatg

SEQ ID NO: 1553 - DNA, 19 bp, Homo Sapiens
acgctgtctctgaccatga

SEQ ID NO: 1554 - DNA, 19 bp, Homo Sapiens
cgctgtctctgaccatgaa

SEQ ID NO: 1555 - DNA, 19 bp, Homo Sapiens
gctgtctctgaccatgaag

SEQ ID NO: 1556 - DNA, 19 bp, Homo Sapiens
ctgtctctgaccatgaagc

SEQ ID NO: 1557 - DNA, 19 bp, Homo Sapiens
tgtctctgaccatgaagcc

SEQ ID NO: 1558 - DNA, 19 bp, Homo Sapiens
gtctctgaccatgaagcca

SEQ ID NO: 1559 - DNA, 19 bp, Homo Sapiens
tctctgaccatgaagccac

SEQ ID NO: 1560 - DNA, 19 bp, Homo Sapiens
ctctgaccatgaagccacc

SEQ ID NO: 1561 - DNA, 19 bp, Homo Sapiens
tctgaccatgaagccaccc

SEQ ID NO: 1562 - DNA, 19 bp, Homo Sapiens
ctgaccatgaagccaccct

SEQ ID NO: 1563 - DNA, 19 bp, Homo Sapiens
tgaccatgaagccaccctg

SEQ ID NO: 1564 - DNA, 19 bp, Homo Sapiens
gaccatgaagccaccctga

SEQ ID NO: 1565 - DNA, 19 bp, Homo Sapiens
accatgaagccaccctgag

SEQ ID NO: 1566 - DNA, 19 bp, Homo Sapiens
catgaagccaccctgaggt

SEQ ID NO: 1567 - DNA, 19 bp, Homo Sapiens
atgaagccaccctgaggtg

SEQ ID NO: 1568 - DNA, 19 bp, Homo Sapiens
tgagcttctaccctgcgga

SEQ ID NO: 1569 - DNA, 19 bp, Homo Sapiens
agcttctaccctgcggaga

SEQ ID NO: 1570 - DNA, 19 bp, Homo Sapiens
gcttctaccctgcggagat

SEQ ID NO: 1571 - DNA, 19 bp, Homo Sapiens
cttctaccctgcggagatc

SEQ ID NO: 1572 - DNA, 19 bp, Homo Sapiens
ttctaccctgcggagatca

SEQ ID NO: 1573 - DNA, 19 bp, Homo Sapiens
tctaccctgcggagatcac

SEQ ID NO: 1574 - DNA, 19 bp, Homo Sapiens
ctaccctgcggagatcaca

SEQ ID NO: 1575 - DNA, 19 bp, Homo Sapiens
taccctgcggagatcacac

SEQ ID NO: 1576 - DNA, 19 bp, Homo Sapiens
accctgcggagatcacact

SEQ ID NO: 1577 - DNA, 19 bp, Homo Sapiens
cctgcggagatcacactga

SEQ ID NO: 1578 - DNA, 19 bp, Homo Sapiens
ctgcggagatcacactgac

SEQ ID NO: 1579 - DNA, 19 bp, Homo Sapiens
tgcggagatcacactgacc

SEQ ID NO: 1580 - DNA, 19 bp, Homo Sapiens
gcggagatcacactgacct

SEQ ID NO: 1581 - DNA, 19 bp, Homo Sapiens
cggagatcacactgacctg

SEQ ID NO: 1582 - DNA, 19 bp, Homo Sapiens
ggagatcacactgacctgg

SEQ ID NO: 1583 - DNA, 19 bp, Homo Sapiens
gagatcacactgacctggc

SEQ ID NO: 1584 - DNA, 19 bp, Homo Sapiens
agatcacactgacctggca

SEQ ID NO: 1585 - DNA, 19 bp, Homo Sapiens
gatcacactgacctggcag

SEQ ID NO: 1586 - DNA, 19 bp, Homo Sapiens
atcacactgacctggcagc

SEQ ID NO: 1587 - DNA, 19 bp, Homo Sapiens
gggatggaaccttccagaa

SEQ ID NO: 1588 - DNA, 19 bp, Homo Sapiens
ggatggaaccttccagaag

SEQ ID NO: 1589 - DNA, 19 bp, Homo Sapiens
gatggaaccttccagaagt

SEQ ID NO: 1590 - DNA, 19 bp, Homo Sapiens
atggaaccttccagaagtg

SEQ ID NO: 1591 - DNA, 19 bp, Homo Sapiens
tggaaccttccagaagtgg

SEQ ID NO: 1592 - DNA, 19 bp, Homo Sapiens
ggaaccttccagaagtggg

SEQ ID NO: 1593 - DNA, 19 bp, Homo Sapiens
gaaccttccagaagtgggc

SEQ ID NO: 1594 - DNA, 19 bp, Homo Sapiens
aaccttccagaagtgggcg

SEQ ID NO: 1595 - DNA, 19 bp, Homo Sapiens
tgtggtggtgccttctgga

SEQ ID NO: 1596 - DNA, 19 bp, Homo Sapiens
tggtggtgccttctggaca

SEQ ID NO: 1597 - DNA, 19 bp, Homo Sapiens
tggtgccttctggacagga

SEQ ID NO: 1598 - DNA, 19 bp, Homo Sapiens
tgccttctggacaggagca

SEQ ID NO: 1599 - DNA, 19 bp, Homo Sapiens
ccttctggacaggagcaga

SEQ ID NO: 1600 - DNA, 19 bp, Homo Sapiens
cttctggacaggagcagag

SEQ ID NO: 1601 - DNA, 19 bp, Homo Sapiens
ttctggacaggagcagaga

SEQ ID NO: 1602 - DNA, 19 bp, Homo Sapiens
tctggacaggagcagagat

SEQ ID NO: 1603 - DNA, 19 bp, Homo Sapiens
ctggacaggagcagagata

SEQ ID NO: 1604 - DNA, 19 bp, Homo Sapiens
tggacaggagcagagatac

SEQ ID NO: 1605 - DNA, 19 bp, Homo Sapiens
ggacaggagcagagataca

SEQ ID NO: 1606 - DNA, 19 bp, Homo Sapiens
gacaggagcagagatacac

SEQ ID NO: 1607 - DNA, 19 bp, Homo Sapiens
acaggagcagagatacacc

SEQ ID NO: 1608 - DNA, 19 bp, Homo Sapiens
caggagcagagatacacct

SEQ ID NO: 1609 - DNA, 19 bp, Homo Sapiens
aggagcagagatacacctg

SEQ ID NO: 1610 - DNA, 19 bp, Homo Sapiens
ggagcagagatacacctgc

SEQ ID NO: 1611 - DNA, 19 bp, Homo Sapiens
gagcagagatacacctgcc

SEQ ID NO: 1612 - DNA, 19 bp, Homo Sapiens
agcagagatacacctgcca

SEQ ID NO: 1613 - DNA, 19 bp, Homo Sapiens
gcagagatacacctgccat

SEQ ID NO: 1614 - DNA, 19 bp, Homo Sapiens
cagagatacacctgccatg

SEQ ID NO: 1615 - DNA, 19 bp, Homo Sapiens
agagatacacctgccatgt

SEQ ID NO: 1616 - DNA, 19 bp, Homo Sapiens
gagatacacctgccatgtg

SEQ ID NO: 1617 - DNA, 19 bp, Homo Sapiens
agatacacctgccatgtgc

SEQ ID NO: 1618 - DNA, 19 bp, Homo Sapiens
gatacacctgccatgtgca

SEQ ID NO: 1619 - DNA, 19 bp, Homo Sapiens
atacacctgccatgtgcag

SEQ ID NO: 1620 - DNA, 19 bp, Homo Sapiens
tacacctgccatgtgcagc

SEQ ID NO: 1621 - DNA, 19 bp, Homo Sapiens
acacctgccatgtgcagca

SEQ ID NO: 1622 - DNA, 19 bp, Homo Sapiens
cacctgccatgtgcagcat

SEQ ID NO: 1623 - DNA, 19 bp, Homo Sapiens
acctgccatgtgcagcatg

SEQ ID NO: 1624 - DNA, 19 bp, Homo Sapiens
cctgccatgtgcagcatga

SEQ ID NO: 1625 - DNA, 19 bp, Homo Sapiens
ctgccatgtgcagcatgag

SEQ ID NO: 1626 - DNA, 19 bp, Homo Sapiens
tgccatgtgcagcatgagg

SEQ ID NO: 1627 - DNA, 19 bp, Homo Sapiens
ccatgtgcagcatgagggt

SEQ ID NO: 1628 - DNA, 19 bp, Homo Sapiens
catgtgcagcatgagggtt

SEQ ID NO: 1629 - DNA, 19 bp, Homo Sapiens
atgtgcagcatgagggttt

SEQ ID NO: 1630 - DNA, 19 bp, Homo Sapiens
tgtgcagcatgagggtttg

SEQ ID NO: 1631 - DNA, 19 bp, Homo Sapiens
gtgcagcatgagggtttgc

SEQ ID NO: 1632 - DNA, 19 bp, Homo Sapiens
tgcagcatgagggtttgcc

SEQ ID NO: 1633 - DNA, 19 bp, Homo Sapiens
cagcatgagggtttgccca

SEQ ID NO: 1634 - DNA, 19 bp, Homo Sapiens
agcatgagggtttgcccaa

SEQ ID NO: 1635 - DNA, 19 bp, Homo Sapiens
gcatgagggtttgcccaag

SEQ ID NO: 1636 - DNA, 19 bp, Homo Sapiens
catgagggtttgcccaagc

SEQ ID NO: 1637 - DNA, 19 bp, Homo Sapiens
atgagggtttgcccaagcc

SEQ ID NO: 1638 - DNA, 19 bp, Homo Sapiens
ctgagatgggagccgtctt

SEQ ID NO: 1639 - DNA, 19 bp, Homo Sapiens
tgagatgggagccgtcttc

SEQ ID NO: 1640 - DNA, 19 bp, Homo Sapiens
cccatcgtgggcatcattg

SEQ ID NO: 1641 - DNA, 19 bp, Homo Sapiens
ccatcgtgggcatcattgc

SEQ ID NO: 1642 - DNA, 19 bp, Homo Sapiens
catcgtgggcatcattgct

SEQ ID NO: 1643 - DNA, 19 bp, Homo Sapiens
atcgtgggcatcattgctg

SEQ ID NO: 1644 - DNA, 19 bp, Homo Sapiens
tcgtgggcatcattgctgg

SEQ ID NO: 1645 - DNA, 19 bp, Homo Sapiens
tgggcatcattgctggcct

SEQ ID NO: 1646 - DNA, 19 bp, Homo Sapiens
gcatcattgctggcctggt

SEQ ID NO: 1647 - DNA, 19 bp, Homo Sapiens
catcattgctggcctggtt

SEQ ID NO: 1648 - DNA, 19 bp, Homo Sapiens
atcattgctggcctggttc

SEQ ID NO: 1649 - DNA, 19 bp, Homo Sapiens
tcattgctggcctggttct

SEQ ID NO: 1650 - DNA, 19 bp, Homo Sapiens
cattgctggcctggttctc

SEQ ID NO: 1651 - DNA, 19 bp, Homo Sapiens
attgctggcctggttctct

SEQ ID NO: 1652 - DNA, 19 bp, Homo Sapiens
ttgctggcctggttctctt

SEQ ID NO: 1653 - DNA, 19 bp, Homo Sapiens
tgctggcctggttctcttt

SEQ ID NO: 1654 - DNA, 19 bp, Homo Sapiens
gctggcctggttctctttg

SEQ ID NO: 1655 - DNA, 19 bp, Homo Sapiens
ctggcctggttctctttgg

SEQ ID NO: 1656 - DNA, 19 bp, Homo Sapiens
tggcctggttctctttgga

SEQ ID NO: 1657 - DNA, 19 bp, Homo Sapiens
ggcctggttctctttggag

SEQ ID NO: 1658 - DNA, 19 bp, Homo Sapiens
gcctggttctctttggagc

SEQ ID NO: 1659 - DNA, 19 bp, Homo Sapiens
cctggttctctttggagct

SEQ ID NO: 1660 - DNA, 19 bp, Homo Sapiens
ctggttctctttggagctg

SEQ ID NO: 1661 - DNA, 19 bp, Homo Sapiens
tggttctctttggagctgt

SEQ ID NO: 1662 - DNA, 19 bp, Homo Sapiens
ggttctctttggagctgtg

SEQ ID NO: 1663 - DNA, 19 bp, Homo Sapiens
gttctctttggagctgtga

SEQ ID NO: 1664 - DNA, 19 bp, Homo Sapiens
ttctctttggagctgtgat

SEQ ID NO: 1665 - DNA, 19 bp, Homo Sapiens
tctctttggagctgtgatc

SEQ ID NO: 1666 - DNA, 19 bp, Homo Sapiens
ctctttggagctgtgatca

SEQ ID NO: 1667 - DNA, 19 bp, Homo Sapiens
tctttggagctgtgatcac

SEQ ID NO: 1668 - DNA, 19 bp, Homo Sapiens
ctttggagctgtgatcact

SEQ ID NO: 1669 - DNA, 19 bp, Homo Sapiens
tttggagctgtgatcactg

SEQ ID NO: 1670 - DNA, 19 bp, Homo Sapiens
ttggagctgtgatcactgg

SEQ ID NO: 1671 - DNA, 19 bp, Homo Sapiens
tggagctgtgatcactgga

SEQ ID NO: 1672 - DNA, 19 bp, Homo Sapiens
ggagctgtgatcactggag

SEQ ID NO: 1673 - DNA, 19 bp, Homo Sapiens
gagctgtgatcactggagc

SEQ ID NO: 1674 - DNA, 19 bp, Homo Sapiens
agctgtgatcactggagct

SEQ ID NO: 1675 - DNA, 19 bp, Homo Sapiens
gctgtgatcactggagctg

SEQ ID NO: 1676 - DNA, 19 bp, Homo Sapiens
ctgtgatcactggagctgt

SEQ ID NO: 1677 - DNA, 19 bp, Homo Sapiens
tgtgatcactggagctgtg

SEQ ID NO: 1678 - DNA, 19 bp, Homo Sapiens
gtgatcactggagctgtgg

SEQ ID NO: 1679 - DNA, 19 bp, Homo Sapiens
tgatcactggagctgtggt

SEQ ID NO: 1680 - DNA, 19 bp, Homo Sapiens
gatcactggagctgtggtc

SEQ ID NO: 1681 - DNA, 19 bp, Homo Sapiens
atcactggagctgtggtcg

SEQ ID NO: 1682 - DNA, 19 bp, Homo Sapiens
ctgtggtcgctgctgtgat

SEQ ID NO: 1683 - DNA, 19 bp, Homo Sapiens
tgtggtcgctgctgtgatg

SEQ ID NO: 1684 - DNA, 19 bp, Homo Sapiens
gtggtcgctgctgtgatgt

SEQ ID NO: 1685 - DNA, 19 bp, Homo Sapiens
tggtcgctgctgtgatgtg

SEQ ID NO: 1686 - DNA, 19 bp, Homo Sapiens
gtcgctgctgtgatgtgga

SEQ ID NO: 1687 - DNA, 19 bp, Homo Sapiens
tcgctgctgtgatgtggag

SEQ ID NO: 1688 - DNA, 19 bp, Homo Sapiens
gctgctgtgatgtggagga

SEQ ID NO: 1689 - DNA, 19 bp, Homo Sapiens
ctgctgtgatgtggaggag

SEQ ID NO: 1690 - DNA, 19 bp, Homo Sapiens
tgctgtgatgtggaggagg

SEQ ID NO: 1691 - DNA, 19 bp, Homo Sapiens
gctgtgatgtggaggagga

SEQ ID NO: 1692 - DNA, 19 bp, Homo Sapiens
ctgtgatgtggaggaggaa

SEQ ID NO: 1693 - DNA, 19 bp, Homo Sapiens
tgtgatgtggaggaggaag

SEQ ID NO: 1694 - DNA, 19 bp, Homo Sapiens
gtgatgtggaggaggaaga

SEQ ID NO: 1695 - DNA, 19 bp, Homo Sapiens
tgatgtggaggaggaagag

SEQ ID NO: 1696 - DNA, 19 bp, Homo Sapiens
gatgtggaggaggaagagc

SEQ ID NO: 1697 - DNA, 19 bp, Homo Sapiens
atgtggaggaggaagagct

SEQ ID NO: 1698 - DNA, 19 bp, Homo Sapiens
tgtggaggaggaagagctc

SEQ ID NO: 1699 - DNA, 19 bp, Homo Sapiens
gtggaggaggaagagctca

SEQ ID NO: 1700 - DNA, 19 bp, Homo Sapiens
tggaggaggaagagctcag

SEQ ID NO: 1701 - DNA, 19 bp, Homo Sapiens
ggaggaggaagagctcaga

SEQ ID NO: 1702 - DNA, 19 bp, Homo Sapiens
gaggaggaagagctcagat

SEQ ID NO: 1703 - DNA, 19 bp, Homo Sapiens
aggaggaagagctcagata

SEQ ID NO: 1704 - DNA, 19 bp, Homo Sapiens
ggaggaagagctcagatag

SEQ ID NO: 1705 - DNA, 19 bp, Homo Sapiens
gaggaagagctcagataga

SEQ ID NO: 1706 - DNA, 19 bp, Homo Sapiens
aggaagagctcagatagaa

SEQ ID NO: 1707 - DNA, 19 bp, Homo Sapiens
aaaggagggagctactctc

SEQ ID NO: 1708 - DNA, 19 bp, Homo Sapiens
aaggagggagctactctca

SEQ ID NO: 1709 - DNA, 19 bp, Homo Sapiens
aggagggagctactctcag

SEQ ID NO: 1710 - DNA, 19 bp, Homo Sapiens
agggagctactctcaggct

SEQ ID NO: 1711 - DNA, 19 bp, Homo Sapiens
gagctactctcaggctgca

SEQ ID NO: 1712 - DNA, 19 bp, Homo Sapiens
agctactctcaggctgcaa

SEQ ID NO: 1713 - DNA, 19 bp, Homo Sapiens
gctactctcaggctgcaag

SEQ ID NO: 1714 - DNA, 19 bp, Homo Sapiens
ctactctcaggctgcaagc

SEQ ID NO: 1715 - DNA, 19 bp, Homo Sapiens
tactctcaggctgcaagca

SEQ ID NO: 1716 - DNA, 19 bp, Homo Sapiens
actctcaggctgcaagcag

SEQ ID NO: 1717 - DNA, 19 bp, Homo Sapiens
ctctcaggctgcaagcagt

SEQ ID NO: 1718 - DNA, 19 bp, Homo Sapiens
tctcaggctgcaagcagtg

SEQ ID NO: 1719 - DNA, 19 bp, Homo Sapiens
ctcaggctgcaagcagtga

SEQ ID NO: 1720 - DNA, 19 bp, Homo Sapiens
tcaggctgcaagcagtgac

SEQ ID NO: 1721 - DNA, 19 bp, Homo Sapiens
caggctgcaagcagtgaca

SEQ ID NO: 1722 - DNA, 19 bp, Homo Sapiens
aggctgcaagcagtgacag

SEQ ID NO: 1723 - DNA, 19 bp, Homo Sapiens
ggctgcaagcagtgacagt

SEQ ID NO: 1724 - DNA, 19 bp, Homo Sapiens
gctgcaagcagtgacagtg

SEQ ID NO: 1725 - DNA, 19 bp, Homo Sapiens
ctgcaagcagtgacagtgc

SEQ ID NO: 1726 - DNA, 19 bp, Homo Sapiens
tgcaagcagtgacagtgcc

SEQ ID NO: 1727 - DNA, 19 bp, Homo Sapiens
caagcagtgacagtgccca

SEQ ID NO: 1728 - DNA, 19 bp, Homo Sapiens
aagcagtgacagtgcccag

SEQ ID NO: 1729 - DNA, 19 bp, Homo Sapiens
ccagggctctgatgtgtct

SEQ ID NO: 1730 - DNA, 19 bp, Homo Sapiens
cagggctctgatgtgtctc

SEQ ID NO: 1731 - DNA, 19 bp, Homo Sapiens
agggctctgatgtgtctct

SEQ ID NO: 1732 - DNA, 19 bp, Homo Sapiens
gggctctgatgtgtctctc

SEQ ID NO: 1733 - DNA, 19 bp, Homo Sapiens
ggctctgatgtgtctctca

SEQ ID NO: 1734 - DNA, 19 bp, Homo Sapiens
gctctgatgtgtctctcac

SEQ ID NO: 1735 - DNA, 19 bp, Homo Sapiens
ctctgatgtgtctctcaca

SEQ ID NO: 1736 - DNA, 19 bp, Homo Sapiens
tctgatgtgtctctcacag

SEQ ID NO: 1737 - DNA, 19 bp, Homo Sapiens
ctgatgtgtctctcacagc

SEQ ID NO: 1738 - DNA, 19 bp, Homo Sapiens
tgatgtgtctctcacagct

SEQ ID NO: 1739 - DNA, 19 bp, Homo Sapiens
gatgtgtctctcacagctt

SEQ ID NO: 1740 - DNA, 19 bp, Homo Sapiens
atgtgtctctcacagcttg

SEQ ID NO: 1741 - DNA, 19 bp, Homo Sapiens
tgtgtctctcacagcttgt

SEQ ID NO: 1742 - DNA, 19 bp, Homo Sapiens
gtgtctctcacagcttgta

SEQ ID NO: 1743 - DNA, 19 bp, Homo Sapiens
tgtctctcacagcttgtaa

SEQ ID NO: 1744 - DNA, 19 bp, Homo Sapiens
gtctctcacagcttgtaaa

SEQ ID NO: 1745 - DNA, 19 bp, Homo Sapiens
tctctcacagcttgtaaag

SEQ ID NO: 1746 - DNA, 19 bp, Homo Sapiens
ctctcacagcttgtaaagt

SEQ ID NO: 1747 - DNA, 19 bp, Homo Sapiens
tctcacagcttgtaaagtg

SEQ ID NO: 1748 - DNA, 19 bp, Homo Sapiens
ctcacagcttgtaaagtgt

SEQ ID NO: 1749 - DNA, 19 bp, Homo Sapiens
tcacagcttgtaaagtgtg

SEQ ID NO: 1750 - DNA, 19 bp, Homo Sapiens
cacagcttgtaaagtgtga

SEQ ID NO: 1751 - DNA, 19 bp, Homo Sapiens
acagcttgtaaagtgtgag

SEQ ID NO: 1752 - DNA, 19 bp, Homo Sapiens
cagcttgtaaagtgtgaga

SEQ ID NO: 1753 - DNA, 19 bp, Homo Sapiens
agcttgtaaagtgtgagac

SEQ ID NO: 1754 - DNA, 19 bp, Homo Sapiens
gcttgtaaagtgtgagaca

SEQ ID NO: 1755 - DNA, 19 bp, Homo Sapiens
cttgtaaagtgtgagacag

SEQ ID NO: 1756 - DNA, 19 bp, Homo Sapiens
ttgtaaagtgtgagacagc

SEQ ID NO: 1757 - DNA, 19 bp, Homo Sapiens
tgtaaagtgtgagacagct

SEQ ID NO: 1758 - DNA, 19 bp, Homo Sapiens
gtaaagtgtgagacagctg

SEQ ID NO: 1759 - DNA, 19 bp, Homo Sapiens
taaagtgtgagacagctgc

SEQ ID NO: 1760 - DNA, 19 bp, Homo Sapiens
aaagtgtgagacagctgcc

SEQ ID NO: 1761 - DNA, 19 bp, Homo Sapiens
aagtgtgagacagctgcct

SEQ ID NO: 1762 - DNA, 19 bp, Homo Sapiens
agtgtgagacagctgcctt

SEQ ID NO: 1763 - DNA, 19 bp, Homo Sapiens
tgtgagacagctgccttgt

SEQ ID NO: 1764 - DNA, 19 bp, Homo Sapiens
gtgagacagctgccttgtg

SEQ ID NO: 1765 - DNA, 19 bp, Homo Sapiens
tgagacagctgccttgtgt

SEQ ID NO: 1766 - DNA, 19 bp, Homo Sapiens
gagacagctgccttgtgtg

SEQ ID NO: 1767 - DNA, 19 bp, Homo Sapiens
agacagctgccttgtgtgg

SEQ ID NO: 1768 - DNA, 19 bp, Homo Sapiens
acagctgccttgtgtggga

SEQ ID NO: 1769 - DNA, 19 bp, Homo Sapiens
agctgccttgtgtgggact

SEQ ID NO: 1770 - DNA, 19 bp, Homo Sapiens
ctgccttgtgtgggactga

SEQ ID NO: 1771 - DNA, 19 bp, Homo Sapiens
tgccttgtgtgggactgag

SEQ ID NO: 1772 - DNA, 19 bp, Homo Sapiens
gccttgtgtgggactgaga

SEQ ID NO: 1773 - DNA, 19 bp, Homo Sapiens
ccttgtgtgggactgagag

SEQ ID NO: 1774 - DNA, 19 bp, Homo Sapiens
cttgtgtgggactgagagg

SEQ ID NO: 1775 - DNA, 19 bp, Homo Sapiens
ttgtgtgggactgagaggc

SEQ ID NO: 1776 - DNA, 19 bp, Homo Sapiens
tgtgtgggactgagaggca

SEQ ID NO: 1777 - DNA, 19 bp, Homo Sapiens
gtgtgggactgagaggcaa

SEQ ID NO: 1778 - DNA, 19 bp, Homo Sapiens
tgtgggactgagaggcaag

SEQ ID NO: 1779 - DNA, 19 bp, Homo Sapiens
gtgggactgagaggcaaga

SEQ ID NO: 1780 - DNA, 19 bp, Homo Sapiens
tgggactgagaggcaagag

SEQ ID NO: 1781 - DNA, 19 bp, Homo Sapiens
gggactgagaggcaagagt

SEQ ID NO: 1782 - DNA, 19 bp, Homo Sapiens
ggactgagaggcaagagtt

SEQ ID NO: 1783 - DNA, 19 bp, Homo Sapiens
gactgagaggcaagagttg

SEQ ID NO: 1784 - DNA, 19 bp, Homo Sapiens
actgagaggcaagagttgt

SEQ ID NO: 1785 - DNA, 19 bp, Homo Sapiens
ctgagaggcaagagttgtt

SEQ ID NO: 1786 - DNA, 19 bp, Homo Sapiens
tgagaggcaagagttgttc

SEQ ID NO: 1787 - DNA, 19 bp, Homo Sapiens
gagaggcaagagttgttcc

SEQ ID NO: 1788 - DNA, 19 bp, Homo Sapiens
agaggcaagagttgttcct

SEQ ID NO: 1789 - DNA, 19 bp, Homo Sapiens
gaggcaagagttgttcctg

SEQ ID NO: 1790 - DNA, 19 bp, Homo Sapiens
aggcaagagttgttcctgc

SEQ ID NO: 1791 - DNA, 19 bp, Homo Sapiens
ggcaagagttgttcctgcc

SEQ ID NO: 1792 - DNA, 19 bp, Homo Sapiens
gcaagagttgttcctgccc

SEQ ID NO: 1793 - DNA, 19 bp, Homo Sapiens
caagagttgttcctgccct

SEQ ID NO: 1794 - DNA, 19 bp, Homo Sapiens
aagagttgttcctgccctt

SEQ ID NO: 1795 - DNA, 19 bp, Homo Sapiens
agagttgttcctgcccttc

SEQ ID NO: 1796 - DNA, 19 bp, Homo Sapiens
gagttgttcctgcccttcc

SEQ ID NO: 1797 - DNA, 19 bp, Homo Sapiens
agttgttcctgcccttccc

SEQ ID NO: 1798 - DNA, 19 bp, Homo Sapiens
gttgttcctgcccttccct

SEQ ID NO: 1799 - DNA, 19 bp, Homo Sapiens
ttgttcctgcccttccctt

SEQ ID NO: 1800 - DNA, 19 bp, Homo Sapiens
tgttcctgcccttcccttt

SEQ ID NO: 1801 - DNA, 19 bp, Homo Sapiens
gttcctgcccttccctttg

SEQ ID NO: 1802 - DNA, 19 bp, Homo Sapiens
ttcctgcccttccctttgt

SEQ ID NO: 1803 - DNA, 19 bp, Homo Sapiens
tcctgcccttccctttgtg

SEQ ID NO: 1804 - DNA, 19 bp, Homo Sapiens
cctgcccttccctttgtga

SEQ ID NO: 1805 - DNA, 19 bp, Homo Sapiens
ctgcccttccctttgtgac

SEQ ID NO: 1806 - DNA, 19 bp, Homo Sapiens
tgcccttccctttgtgact

SEQ ID NO: 1807 - DNA, 19 bp, Homo Sapiens
gcccttccctttgtgactt

SEQ ID NO: 1808 - DNA, 19 bp, Homo Sapiens
cccttccctttgtgacttg

SEQ ID NO: 1809 - DNA, 19 bp, Homo Sapiens
ccttccctttgtgacttga

SEQ ID NO: 1810 - DNA, 19 bp, Homo Sapiens
cttccctttgtgacttgaa

SEQ ID NO: 1811 - DNA, 19 bp, Homo Sapiens
ttccctttgtgacttgaag

SEQ ID NO: 1812 - DNA, 19 bp, Homo Sapiens
tccctttgtgacttgaaga

SEQ ID NO: 1813 - DNA, 19 bp, Homo Sapiens
ccctttgtgacttgaagaa

SEQ ID NO: 1814 - DNA, 19 bp, Homo Sapiens
cctttgtgacttgaagaac

SEQ ID NO: 1815 - DNA, 19 bp, Homo Sapiens
ctttgtgacttgaagaacc

SEQ ID NO: 1816 - DNA, 19 bp, Homo Sapiens
tttgtgacttgaagaaccc

SEQ ID NO: 1817 - DNA, 19 bp, Homo Sapiens
ttgtgacttgaagaaccct

SEQ ID NO: 1818 - DNA, 19 bp, Homo Sapiens
tgtgacttgaagaaccctg

SEQ ID NO: 1819 - DNA, 19 bp, Homo Sapiens
gtgacttgaagaaccctga

SEQ ID NO: 1820 - DNA, 19 bp, Homo Sapiens
tgacttgaagaaccctgac

SEQ ID NO: 1821 - DNA, 19 bp, Homo Sapiens
gacttgaagaaccctgact

SEQ ID NO: 1822 - DNA, 19 bp, Homo Sapiens
acttgaagaaccctgactt

SEQ ID NO: 1823 - DNA, 19 bp, Homo Sapiens
cttgaagaaccctgacttt

SEQ ID NO: 1824 - DNA, 19 bp, Homo Sapiens
ttgaagaaccctgactttg

SEQ ID NO: 1825 - DNA, 19 bp, Homo Sapiens
tgaagaaccctgactttgt

SEQ ID NO: 1826 - DNA, 19 bp, Homo Sapiens
gaagaaccctgactttgtt

SEQ ID NO: 1827 - DNA, 19 bp, Homo Sapiens
aagaaccctgactttgttt

SEQ ID NO: 1828 - DNA, 19 bp, Homo Sapiens
agaaccctgactttgtttc

SEQ ID NO: 1829 - DNA, 19 bp, Homo Sapiens
gaaccctgactttgtttct

SEQ ID NO: 1830 - DNA, 19 bp, Homo Sapiens
aaccctgactttgtttctg

SEQ ID NO: 1831 - DNA, 19 bp, Homo Sapiens
accctgactttgtttctgc

SEQ ID NO: 1832 - DNA, 19 bp, Homo Sapiens
ccctgactttgtttctgca

SEQ ID NO: 1833 - DNA, 19 bp, Homo Sapiens
cctgactttgtttctgcaa

SEQ ID NO: 1834 - DNA, 19 bp, Homo Sapiens
ctgactttgtttctgcaaa

SEQ ID NO: 1835 - DNA, 19 bp, Homo Sapiens
tgactttgtttctgcaaag

SEQ ID NO: 1836 - DNA, 19 bp, Homo Sapiens
gactttgtttctgcaaagg

SEQ ID NO: 1837 - DNA, 19 bp, Homo Sapiens
actttgtttctgcaaaggc

SEQ ID NO: 1838 - DNA, 19 bp, Homo Sapiens
ctttgtttctgcaaaggca

SEQ ID NO: 1839 - DNA, 19 bp, Homo Sapiens
tttgtttctgcaaaggcac

SEQ ID NO: 1840 - DNA, 19 bp, Homo Sapiens
ttgtttctgcaaaggcacc

SEQ ID NO: 1841 - DNA, 19 bp, Homo Sapiens
tgtttctgcaaaggcacct

SEQ ID NO: 1842 - DNA, 19 bp, Homo Sapiens
gtttctgcaaaggcacctg

SEQ ID NO: 1843 - DNA, 19 bp, Homo Sapiens
tttctgcaaaggcacctgc

SEQ ID NO: 1844 - DNA, 19 bp, Homo Sapiens
ttctgcaaaggcacctgca

SEQ ID NO: 1845 - DNA, 19 bp, Homo Sapiens
tctgcaaaggcacctgcat

SEQ ID NO: 1846 - DNA, 19 bp, Homo Sapiens
ctgcaaaggcacctgcatg

SEQ ID NO: 1847 - DNA, 19 bp, Homo Sapiens
tgcaaaggcacctgcatgt

SEQ ID NO: 1848 - DNA, 19 bp, Homo Sapiens
gcaaaggcacctgcatgtg

SEQ ID NO: 1849 - DNA, 19 bp, Homo Sapiens
caaaggcacctgcatgtgt

SEQ ID NO: 1850 - DNA, 19 bp, Homo Sapiens
aaaggcacctgcatgtgtc

SEQ ID NO: 1851 - DNA, 19 bp, Homo Sapiens
aaggcacctgcatgtgtct

SEQ ID NO: 1852 - DNA, 19 bp, Homo Sapiens
gcacctgcatgtgtctgtg

SEQ ID NO: 1853 - DNA, 19 bp, Homo Sapiens
cacctgcatgtgtctgtgt

SEQ ID NO: 1854 - DNA, 19 bp, Homo Sapiens
acctgcatgtgtctgtgtt

SEQ ID NO: 1855 - DNA, 19 bp, Homo Sapiens
cctgcatgtgtctgtgttc

SEQ ID NO: 1856 - DNA, 19 bp, Homo Sapiens
ctgcatgtgtctgtgttcg

SEQ ID NO: 1857 - DNA, 19 bp, Homo Sapiens
tgcatgtgtctgtgttcgt

SEQ ID NO: 1858 - DNA, 19 bp, Homo Sapiens
gcatgtgtctgtgttcgtg

SEQ ID NO: 1859 - DNA, 19 bp, Homo Sapiens
catgtgtctgtgttcgtgt

SEQ ID NO: 1860 - DNA, 19 bp, Homo Sapiens
atgtgtctgtgttcgtgta

SEQ ID NO: 1861 - DNA, 19 bp, Homo Sapiens
tgtgtctgtgttcgtgtag

SEQ ID NO: 1862 - DNA, 19 bp, Homo Sapiens
gtgtctgtgttcgtgtagg

SEQ ID NO: 1863 - DNA, 19 bp, Homo Sapiens
tgtctgtgttcgtgtaggc

SEQ ID NO: 1864 - DNA, 19 bp, Homo Sapiens
gtctgtgttcgtgtaggca

SEQ ID NO: 1865 - DNA, 19 bp, Homo Sapiens
tctgtgttcgtgtaggcat

SEQ ID NO: 1866 - DNA, 19 bp, Homo Sapiens
ctgtgttcgtgtaggcata

SEQ ID NO: 1867 - DNA, 19 bp, Homo Sapiens
tgtgttcgtgtaggcataa

SEQ ID NO: 1868 - DNA, 19 bp, Homo Sapiens
gtgttcgtgtaggcataat

SEQ ID NO: 1869 - DNA, 19 bp, Homo Sapiens
tgttcgtgtaggcataatg

SEQ ID NO: 1870 - DNA, 19 bp, Homo Sapiens
gttcgtgtaggcataatgt

SEQ ID NO: 1871 - DNA, 19 bp, Homo Sapiens
ttcgtgtaggcataatgtg

SEQ ID NO: 1872 - DNA, 19 bp, Homo Sapiens
tcgtgtaggcataatgtga

SEQ ID NO: 1873 - DNA, 19 bp, Homo Sapiens
cgtgtaggcataatgtgag

SEQ ID NO: 1874 - DNA, 19 bp, Homo Sapiens
gtgtaggcataatgtgagg

SEQ ID NO: 1875 - DNA, 19 bp, Homo Sapiens
tgtaggcataatgtgagga

SEQ ID NO: 1876 - DNA, 19 bp, Homo Sapiens
gtaggcataatgtgaggag

SEQ ID NO: 1877 - DNA, 19 bp, Homo Sapiens
taggcataatgtgaggagg

SEQ ID NO: 1878 - DNA, 19 bp, Homo Sapiens
aggcataatgtgaggaggt

SEQ ID NO: 1879 - DNA, 19 bp, Homo Sapiens
ggcataatgtgaggaggtg

SEQ ID NO: 1880 - DNA, 19 bp, Homo Sapiens
gcataatgtgaggaggtgg

SEQ ID NO: 1881 - DNA, 19 bp, Homo Sapiens
cataatgtgaggaggtggg

SEQ ID NO: 1882 - DNA, 19 bp, Homo Sapiens
ccatgtccaccatgaccct

SEQ ID NO: 1883 - DNA, 19 bp, Homo Sapiens
catgtccaccatgaccctc

SEQ ID NO: 1884 - DNA, 19 bp, Homo Sapiens
atgtccaccatgaccctct

SEQ ID NO: 1885 - DNA, 19 bp, Homo Sapiens
tgtccaccatgaccctctt

SEQ ID NO: 1886 - DNA, 19 bp, Homo Sapiens
gtccaccatgaccctcttc

SEQ ID NO: 1887 - DNA, 19 bp, Homo Sapiens
tccaccatgaccctcttcc

SEQ ID NO: 1888 - DNA, 19 bp, Homo Sapiens
caccatgaccctcttccca

SEQ ID NO: 1889 - DNA, 19 bp, Homo Sapiens
accatgaccctcttcccac

SEQ ID NO: 1890 - DNA, 19 bp, Homo Sapiens
atgaccctcttcccacgct

SEQ ID NO: 1891 - DNA, 19 bp, Homo Sapiens
tcttcccacgctgacctgt

SEQ ID NO: 1892 - DNA, 19 bp, Homo Sapiens
cccaatcatctttcctgtt

SEQ ID NO: 1893 - DNA, 19 bp, Homo Sapiens
ccaatcatctttcctgttc

SEQ ID NO: 1894 - DNA, 19 bp, Homo Sapiens
caatcatctttcctgttcc

SEQ ID NO: 1895 - DNA, 19 bp, Homo Sapiens
aatcatctttcctgttcca

SEQ ID NO: 1896 - DNA, 19 bp, Homo Sapiens
atcatctttcctgttccag

SEQ ID NO: 1897 - DNA, 19 bp, Homo Sapiens
catctttcctgttccagag

SEQ ID NO: 1898 - DNA, 19 bp, Homo Sapiens
atctttcctgttccagaga

SEQ ID NO: 1899 - DNA, 19 bp, Homo Sapiens
tctttcctgttccagagag

SEQ ID NO: 1900 - DNA, 19 bp, Homo Sapiens
ctttcctgttccagagagg

SEQ ID NO: 1901 - DNA, 19 bp, Homo Sapiens
tttcctgttccagagaggt

SEQ ID NO: 1902 - DNA, 19 bp, Homo Sapiens
ttcctgttccagagaggtg

SEQ ID NO: 1903 - DNA, 19 bp, Homo Sapiens
tcctgttccagagaggtgg

SEQ ID NO: 1904 - DNA, 19 bp, Homo Sapiens
ggctgaggtgtctccatct

SEQ ID NO: 1905 - DNA, 19 bp, Homo Sapiens
gctgaggtgtctccatctc

SEQ ID NO: 1906 - DNA, 19 bp, Homo Sapiens
ctgaggtgtctccatctct

SEQ ID NO: 1907 - DNA, 19 bp, Homo Sapiens
tgaggtgtctccatctctg

SEQ ID NO: 1908 - DNA, 19 bp, Homo Sapiens
gaggtgtctccatctctgt

SEQ ID NO: 1909 - DNA, 19 bp, Homo Sapiens
aggtgtctccatctctgtc

SEQ ID NO: 1910 - DNA, 19 bp, Homo Sapiens
ggtgtctccatctctgtct

SEQ ID NO: 1911 - DNA, 19 bp, Homo Sapiens
gtgtctccatctctgtctc

SEQ ID NO: 1912 - DNA, 19 bp, Homo Sapiens
tgtctccatctctgtctca

SEQ ID NO: 1913 - DNA, 19 bp, Homo Sapiens
gtctccatctctgtctcaa

SEQ ID NO: 1914 - DNA, 19 bp, Homo Sapiens
tctccatctctgtctcaac

SEQ ID NO: 1915 - DNA, 19 bp, Homo Sapiens
ctccatctctgtctcaact

SEQ ID NO: 1916 - DNA, 19 bp, Homo Sapiens
tccatctctgtctcaactt

SEQ ID NO: 1917 - DNA, 19 bp, Homo Sapiens
ccatctctgtctcaacttc

SEQ ID NO: 1918 - DNA, 19 bp, Homo Sapiens
catctctgtctcaacttca

SEQ ID NO: 1919 - DNA, 19 bp, Homo Sapiens
atctctgtctcaacttcat

SEQ ID NO: 1920 - DNA, 19 bp, Homo Sapiens
tctctgtctcaacttcatg

SEQ ID NO: 1921 - DNA, 19 bp, Homo Sapiens
ctctgtctcaacttcatgg

SEQ ID NO: 1922 - DNA, 19 bp, Homo Sapiens
tctgtctcaacttcatggt

SEQ ID NO: 1923 - DNA, 19 bp, Homo Sapiens
ctgtctcaacttcatggtg

SEQ ID NO: 1924 - DNA, 19 bp, Homo Sapiens
tgtctcaacttcatggtgc

SEQ ID NO: 1925 - DNA, 19 bp, Homo Sapiens
gtctcaacttcatggtgca

SEQ ID NO: 1926 - DNA, 19 bp, Homo Sapiens
tctcaacttcatggtgcac

SEQ ID NO: 1927 - DNA, 19 bp, Homo Sapiens
ctcaacttcatggtgcact

SEQ ID NO: 1928 - DNA, 19 bp, Homo Sapiens
tcaacttcatggtgcactg

SEQ ID NO: 1929 - DNA, 19 bp, Homo Sapiens
caacttcatggtgcactga

SEQ ID NO: 1930 - DNA, 19 bp, Homo Sapiens
aacttcatggtgcactgag

SEQ ID NO: 1931 - DNA, 19 bp, Homo Sapiens
acttcatggtgcactgagc

SEQ ID NO: 1932 - DNA, 19 bp, Homo Sapiens
cttcatggtgcactgagct

SEQ ID NO: 1933 - DNA, 19 bp, Homo Sapiens
ttcatggtgcactgagctg

SEQ ID NO: 1934 - DNA, 19 bp, Homo Sapiens
tcatggtgcactgagctgt

SEQ ID NO: 1935 - DNA, 19 bp, Homo Sapiens
catggtgcactgagctgta

SEQ ID NO: 1936 - DNA, 19 bp, Homo Sapiens
atggtgcactgagctgtaa

SEQ ID NO: 1937 - DNA, 19 bp, Homo Sapiens
tggtgcactgagctgtaac

SEQ ID NO: 1938 - DNA, 19 bp, Homo Sapiens
ggtgcactgagctgtaact

SEQ ID NO: 1939 - DNA, 19 bp, Homo Sapiens
gtgcactgagctgtaactt

SEQ ID NO: 1940 - DNA, 19 bp, Homo Sapiens
tgcactgagctgtaacttc

SEQ ID NO: 1941 - DNA, 19 bp, Homo Sapiens
gcactgagctgtaacttct

SEQ ID NO: 1942 - DNA, 19 bp, Homo Sapiens
cactgagctgtaacttctt

SEQ ID NO: 1943 - DNA, 19 bp, Homo Sapiens
actgagctgtaacttcttc

SEQ ID NO: 1944 - DNA, 19 bp, Homo Sapiens
ctgagctgtaacttcttcc

SEQ ID NO: 1945 - DNA, 19 bp, Homo Sapiens
tgagctgtaacttcttcct

SEQ ID NO: 1946 - DNA, 19 bp, Homo Sapiens
gagctgtaacttcttcctt

SEQ ID NO: 1947 - DNA, 19 bp, Homo Sapiens
agctgtaacttcttccttc

SEQ ID NO: 1948 - DNA, 19 bp, Homo Sapiens
gctgtaacttcttccttcc

SEQ ID NO: 1949 - DNA, 19 bp, Homo Sapiens
ctgtaacttcttccttccc

SEQ ID NO: 1950 - DNA, 19 bp, Homo Sapiens
tgtaacttcttccttccct

SEQ ID NO: 1951 - DNA, 19 bp, Homo Sapiens
gtaacttcttccttcccta

SEQ ID NO: 1952 - DNA, 19 bp, Homo Sapiens
taacttcttccttccctat

SEQ ID NO: 1953 - DNA, 19 bp, Homo Sapiens
aacttcttccttccctatt

SEQ ID NO: 1954 - DNA, 19 bp, Homo Sapiens
acttcttccttccctatta

SEQ ID NO: 1955 - DNA, 19 bp, Homo Sapiens
cttcttccttccctattaa

SEQ ID NO: 1956 - DNA, 19 bp, Homo Sapiens
ttcttccttccctattaaa

SEQ ID NO: 1957 - DNA, 20 bp, Homo Sapiens
ccgaaggcggtgtatggatt

SEQ ID NO: 1958 - DNA, 20 bp, Homo Sapiens
cgaaggcggtgtatggattg

SEQ ID NO: 1959 - DNA, 20 bp, Homo Sapiens
gaaggcggtgtatggattgg

SEQ ID NO: 1960 - DNA, 20 bp, Homo Sapiens
aaggcggtgtatggattggg

SEQ ID NO: 1961 - DNA, 20 bp, Homo Sapiens
cccaactccgcagtttcttt

SEQ ID NO: 1962 - DNA, 20 bp, Homo Sapiens
tttctccctctcccaaccta

SEQ ID NO: 1963 - DNA, 20 bp, Homo Sapiens
ttctccctctcccaacctat

SEQ ID NO: 1964 - DNA, 20 bp, Homo Sapiens
tctccctctcccaacctatg

SEQ ID NO: 1965 - DNA, 20 bp, Homo Sapiens
ctccctctcccaacctatgt

SEQ ID NO: 1966 - DNA, 20 bp, Homo Sapiens
tccctctcccaacctatgta

SEQ ID NO: 1967 - DNA, 20 bp, Homo Sapiens
ccctctcccaacctatgtag

SEQ ID NO: 1968 - DNA, 20 bp, Homo Sapiens
cctctcccaacctatgtagg

SEQ ID NO: 1969 - DNA, 20 bp, Homo Sapiens
ctctcccaacctatgtaggg

SEQ ID NO: 1970 - DNA, 20 bp, Homo Sapiens
tctcccaacctatgtagggt

SEQ ID NO: 1971 - DNA, 20 bp, Homo Sapiens
ctcccaacctatgtagggtc

SEQ ID NO: 1972 - DNA, 20 bp, Homo Sapiens
tcccaacctatgtagggtcc

SEQ ID NO: 1973 - DNA, 20 bp, Homo Sapiens
cccaacctatgtagggtcct

SEQ ID NO: 1974 - DNA, 20 bp, Homo Sapiens
ccaacctatgtagggtcctt

SEQ ID NO: 1975 - DNA, 20 bp, Homo Sapiens
caacctatgtagggtccttc

SEQ ID NO: 1976 - DNA, 20 bp, Homo Sapiens
aacctatgtagggtccttct

SEQ ID NO: 1977 - DNA, 20 bp, Homo Sapiens
acctatgtagggtccttctt

SEQ ID NO: 1978 - DNA, 20 bp, Homo Sapiens
cctatgtagggtccttcttc

SEQ ID NO: 1979 - DNA, 20 bp, Homo Sapiens
ctatgtagggtccttcttcc

SEQ ID NO: 1980 - DNA, 20 bp, Homo Sapiens
tatgtagggtccttcttcct

SEQ ID NO: 1981 - DNA, 20 bp, Homo Sapiens
atgtagggtccttcttcctg

SEQ ID NO: 1982 - DNA, 20 bp, Homo Sapiens
tgtagggtccttcttcctgg

SEQ ID NO: 1983 - DNA, 20 bp, Homo Sapiens
gtagggtccttcttcctgga

SEQ ID NO: 1984 - DNA, 20 bp, Homo Sapiens
tagggtccttcttcctggat

SEQ ID NO: 1985 - DNA, 20 bp, Homo Sapiens
agggtccttcttcctggata

SEQ ID NO: 1986 - DNA, 20 bp, Homo Sapiens
gggtccttcttcctggatac

SEQ ID NO: 1987 - DNA, 20 bp, Homo Sapiens
ggtccttcttcctggatact

SEQ ID NO: 1988 - DNA, 20 bp, Homo Sapiens
gtccttcttcctggatactc

SEQ ID NO: 1989 - DNA, 20 bp, Homo Sapiens
tccttcttcctggatactca

SEQ ID NO: 1990 - DNA, 20 bp, Homo Sapiens
ccttcttcctggatactcac

SEQ ID NO: 1991 - DNA, 20 bp, Homo Sapiens
cttcttcctggatactcacg

SEQ ID NO: 1992 - DNA, 20 bp, Homo Sapiens
ttcttcctggatactcacga

SEQ ID NO: 1993 - DNA, 20 bp, Homo Sapiens
tcttcctggatactcacgac

SEQ ID NO: 1994 - DNA, 20 bp, Homo Sapiens
cttcctggatactcacgacg

SEQ ID NO: 1995 - DNA, 20 bp, Homo Sapiens
ttcctggatactcacgacgc

SEQ ID NO: 1996 - DNA, 20 bp, Homo Sapiens
gacccagttctcactcccat

SEQ ID NO: 1997 - DNA, 20 bp, Homo Sapiens
acccagttctcactcccatt

SEQ ID NO: 1998 - DNA, 20 bp, Homo Sapiens
cccagttctcactcccattg

SEQ ID NO: 1999 - DNA, 20 bp, Homo Sapiens
ccagttctcactcccattgg

SEQ ID NO: 2000 - DNA, 20 bp, Homo Sapiens
cagttctcactcccattggg

SEQ ID NO: 2001 - DNA, 20 bp, Homo Sapiens
agttctcactcccattgggt

SEQ ID NO: 2002 - DNA, 20 bp, Homo Sapiens
gttctcactcccattgggtg

SEQ ID NO: 2003 - DNA, 20 bp, Homo Sapiens
ttctcactcccattgggtgt

SEQ ID NO: 2004 - DNA, 20 bp, Homo Sapiens
tctcactcccattgggtgtc

SEQ ID NO: 2005 - DNA, 20 bp, Homo Sapiens
tcccattgggtgtcgggttt

SEQ ID NO: 2006 - DNA, 20 bp, Homo Sapiens
cattgggtgtcgggtttcca

SEQ ID NO: 2007 - DNA, 20 bp, Homo Sapiens
attgggtgtcgggtttccag

SEQ ID NO: 2008 - DNA, 20 bp, Homo Sapiens
ttgggtgtcgggtttccaga

SEQ ID NO: 2009 - DNA, 20 bp, Homo Sapiens
ggtgtcgggtttccagagaa

SEQ ID NO: 2010 - DNA, 20 bp, Homo Sapiens
gtgtcgggtttccagagaag

SEQ ID NO: 2011 - DNA, 20 bp, Homo Sapiens
tgtcgggtttccagagaagc

SEQ ID NO: 2012 - DNA, 20 bp, Homo Sapiens
tcgggtttccagagaagcca

SEQ ID NO: 2013 - DNA, 20 bp, Homo Sapiens
cgggtttccagagaagccaa

SEQ ID NO: 2014 - DNA, 20 bp, Homo Sapiens
gggtttccagagaagccaat

SEQ ID NO: 2015 - DNA, 20 bp, Homo Sapiens
ggtttccagagaagccaatc

SEQ ID NO: 2016 - DNA, 20 bp, Homo Sapiens
gtttccagagaagccaatca

SEQ ID NO: 2017 - DNA, 20 bp, Homo Sapiens
tttccagagaagccaatcag

SEQ ID NO: 2018 - DNA, 20 bp, Homo Sapiens
ttccagagaagccaatcagt

SEQ ID NO: 2019 - DNA, 20 bp, Homo Sapiens
tccagagaagccaatcagtg

SEQ ID NO: 2020 - DNA, 20 bp, Homo Sapiens
ccagagaagccaatcagtgt

SEQ ID NO: 2021 - DNA, 20 bp, Homo Sapiens
cagagaagccaatcagtgtc

SEQ ID NO: 2022 - DNA, 20 bp, Homo Sapiens
agagaagccaatcagtgtcg

SEQ ID NO: 2023 - DNA, 20 bp, Homo Sapiens
gagaagccaatcagtgtcgt

SEQ ID NO: 2024 - DNA, 20 bp, Homo Sapiens
agaagccaatcagtgtcgtc

SEQ ID NO: 2025 - DNA, 20 bp, Homo Sapiens
gaagccaatcagtgtcgtcg

SEQ ID NO: 2026 - DNA, 20 bp, Homo Sapiens
aagccaatcagtgtcgtcgc

SEQ ID NO: 2027 - DNA, 20 bp, Homo Sapiens
tcgcggttctaaagtccgca

SEQ ID NO: 2028 - DNA, 20 bp, Homo Sapiens
ggttctaaagtccgcacgca

SEQ ID NO: 2029 - DNA, 20 bp, Homo Sapiens
gttctaaagtccgcacgcac

SEQ ID NO: 2030 - DNA, 20 bp, Homo Sapiens
ttctaaagtccgcacgcacc

SEQ ID NO: 2031 - DNA, 20 bp, Homo Sapiens
aaccctcgtcctgctactct

SEQ ID NO: 2032 - DNA, 20 bp, Homo Sapiens
ggctctcactccatgaggta

SEQ ID NO: 2033 - DNA, 20 bp, Homo Sapiens
gctctcactccatgaggtat

SEQ ID NO: 2034 - DNA, 20 bp, Homo Sapiens
ctctcactccatgaggtatt

SEQ ID NO: 2035 - DNA, 20 bp, Homo Sapiens
tctcactccatgaggtattt

SEQ ID NO: 2036 - DNA, 20 bp, Homo Sapiens
ctcactccatgaggtatttc

SEQ ID NO: 2037 - DNA, 20 bp, Homo Sapiens
tcactccatgaggtatttct

SEQ ID NO: 2038 - DNA, 20 bp, Homo Sapiens
cactccatgaggtatttctt

SEQ ID NO: 2039 - DNA, 20 bp, Homo Sapiens
actccatgaggtatttcttc

SEQ ID NO: 2040 - DNA, 20 bp, Homo Sapiens
ctccatgaggtatttcttca

SEQ ID NO: 2041 - DNA, 20 bp, Homo Sapiens
tccatgaggtatttcttcac

SEQ ID NO: 2042 - DNA, 20 bp, Homo Sapiens
ccatgaggtatttcttcaca

SEQ ID NO: 2043 - DNA, 20 bp, Homo Sapiens
catgaggtatttcttcacat

SEQ ID NO: 2044 - DNA, 20 bp, Homo Sapiens
atgaggtatttcttcacatc

SEQ ID NO: 2045 - DNA, 20 bp, Homo Sapiens
tgaggtatttcttcacatcc

SEQ ID NO: 2046 - DNA, 20 bp, Homo Sapiens
gaggtatttcttcacatccg

SEQ ID NO: 2047 - DNA, 20 bp, Homo Sapiens
aggtatttcttcacatccgt

SEQ ID NO: 2048 - DNA, 20 bp, Homo Sapiens
ggtatttcttcacatccgtg

SEQ ID NO: 2049 - DNA, 20 bp, Homo Sapiens
gtatttcttcacatccgtgt

SEQ ID NO: 2050 - DNA, 20 bp, Homo Sapiens
tatttcttcacatccgtgtc

SEQ ID NO: 2051 - DNA, 20 bp, Homo Sapiens
atttcttcacatccgtgtcc

SEQ ID NO: 2052 - DNA, 20 bp, Homo Sapiens
tttcttcacatccgtgtccc

SEQ ID NO: 2053 - DNA, 20 bp, Homo Sapiens
ttcttcacatccgtgtcccg

SEQ ID NO: 2054 - DNA, 20 bp, Homo Sapiens
ttcatcgcagtgggctacgt

SEQ ID NO: 2055 - DNA, 20 bp, Homo Sapiens
tacgtggacgacacgcagtt

SEQ ID NO: 2056 - DNA, 20 bp, Homo Sapiens
gggagacacggaaagtgaag

SEQ ID NO: 2057 - DNA, 20 bp, Homo Sapiens
ggagacacggaaagtgaagg

SEQ ID NO: 2058 - DNA, 20 bp, Homo Sapiens
gagacacggaaagtgaaggc

SEQ ID NO: 2059 - DNA, 20 bp, Homo Sapiens
agacacggaaagtgaaggcc

SEQ ID NO: 2060 - DNA, 20 bp, Homo Sapiens
acacggaaagtgaaggccca

SEQ ID NO: 2061 - DNA, 20 bp, Homo Sapiens
acggaaagtgaaggcccact

SEQ ID NO: 2062 - DNA, 20 bp, Homo Sapiens
ggaaagtgaaggcccactca

SEQ ID NO: 2063 - DNA, 20 bp, Homo Sapiens
gaaagtgaaggcccactcac

SEQ ID NO: 2064 - DNA, 20 bp, Homo Sapiens
aaagtgaaggcccactcaca

SEQ ID NO: 2065 - DNA, 20 bp, Homo Sapiens
aagtgaaggcccactcacag

SEQ ID NO: 2066 - DNA, 20 bp, Homo Sapiens
agtgaaggcccactcacaga

SEQ ID NO: 2067 - DNA, 20 bp, Homo Sapiens
tgaaggcccactcacagact

SEQ ID NO: 2068 - DNA, 20 bp, Homo Sapiens
aaggcccactcacagactca

SEQ ID NO: 2069 - DNA, 20 bp, Homo Sapiens
cactcacagactcaccgagt

SEQ ID NO: 2070 - DNA, 20 bp, Homo Sapiens
actcacagactcaccgagtg

SEQ ID NO: 2071 - DNA, 20 bp, Homo Sapiens
tcacagactcaccgagtgga

SEQ ID NO: 2072 - DNA, 20 bp, Homo Sapiens
ggctactacaaccagagcga

SEQ ID NO: 2073 - DNA, 20 bp, Homo Sapiens
ctactacaaccagagcgagg

SEQ ID NO: 2074 - DNA, 20 bp, Homo Sapiens
tactacaaccagagcgaggc

SEQ ID NO: 2075 - DNA, 20 bp, Homo Sapiens
ttctcacaccgtccagagga

SEQ ID NO: 2076 - DNA, 20 bp, Homo Sapiens
tctcacaccgtccagaggat

SEQ ID NO: 2077 - DNA, 20 bp, Homo Sapiens
tcacaccgtccagaggatgt

SEQ ID NO: 2078 - DNA, 20 bp, Homo Sapiens
cacaccgtccagaggatgta

SEQ ID NO: 2079 - DNA, 20 bp, Homo Sapiens
acaccgtccagaggatgtat

SEQ ID NO: 2080 - DNA, 20 bp, Homo Sapiens
caccgtccagaggatgtatg

SEQ ID NO: 2081 - DNA, 20 bp, Homo Sapiens
accgtccagaggatgtatgg

SEQ ID NO: 2082 - DNA, 20 bp, Homo Sapiens
cgtccagaggatgtatggct

SEQ ID NO: 2083 - DNA, 20 bp, Homo Sapiens
gtccagaggatgtatggctg

SEQ ID NO: 2084 - DNA, 20 bp, Homo Sapiens
tccagaggatgtatggctgc

SEQ ID NO: 2085 - DNA, 20 bp, Homo Sapiens
cagaggatgtatggctgcga

SEQ ID NO: 2086 - DNA, 20 bp, Homo Sapiens
agaggatgtatggctgcgac

SEQ ID NO: 2087 - DNA, 20 bp, Homo Sapiens
aggatgtatggctgcgacgt

SEQ ID NO: 2088 - DNA, 20 bp, Homo Sapiens
taccaccagtacgcctacga

SEQ ID NO: 2089 - DNA, 20 bp, Homo Sapiens
gcctacgacggcaaggatta

SEQ ID NO: 2090 - DNA, 20 bp, Homo Sapiens
cctacgacggcaaggattac

SEQ ID NO: 2091 - DNA, 20 bp, Homo Sapiens
ctacgacggcaaggattaca

SEQ ID NO: 2092 - DNA, 20 bp, Homo Sapiens
tacgacggcaaggattacat

SEQ ID NO: 2093 - DNA, 20 bp, Homo Sapiens
acgacggcaaggattacatc

SEQ ID NO: 2094 - DNA, 20 bp, Homo Sapiens
cgacggcaaggattacatcg

SEQ ID NO: 2095 - DNA, 20 bp, Homo Sapiens
gacggcaaggattacatcgc

SEQ ID NO: 2096 - DNA, 20 bp, Homo Sapiens
acggcaaggattacatcgcc

SEQ ID NO: 2097 - DNA, 20 bp, Homo Sapiens
ggcaaggattacatcgccct

SEQ ID NO: 2098 - DNA, 20 bp, Homo Sapiens
gcaaggattacatcgccctg

SEQ ID NO: 2099 - DNA, 20 bp, Homo Sapiens
caaggattacatcgccctga

SEQ ID NO: 2100 - DNA, 20 bp, Homo Sapiens
aaggattacatcgccctgaa

SEQ ID NO: 2101 - DNA, 20 bp, Homo Sapiens
aggattacatcgccctgaaa

SEQ ID NO: 2102 - DNA, 20 bp, Homo Sapiens
gattacatcgccctgaaaga

SEQ ID NO: 2103 - DNA, 20 bp, Homo Sapiens
attacatcgccctgaaagag

SEQ ID NO: 2104 - DNA, 20 bp, Homo Sapiens
ttacatcgccctgaaagagg

SEQ ID NO: 2105 - DNA, 20 bp, Homo Sapiens
tacatcgccctgaaagagga

SEQ ID NO: 2106 - DNA, 20 bp, Homo Sapiens
acatcgccctgaaagaggac

SEQ ID NO: 2107 - DNA, 20 bp, Homo Sapiens
atcgccctgaaagaggacct

SEQ ID NO: 2108 - DNA, 20 bp, Homo Sapiens
tgaaagaggacctgcgctct

SEQ ID NO: 2109 - DNA, 20 bp, Homo Sapiens
gaaagaggacctgcgctctt

SEQ ID NO: 2110 - DNA, 20 bp, Homo Sapiens
aaagaggacctgcgctcttg

SEQ ID NO: 2111 - DNA, 20 bp, Homo Sapiens
atggcagctcagaccaccaa

SEQ ID NO: 2112 - DNA, 20 bp, Homo Sapiens
agctcagaccaccaagcaca

SEQ ID NO: 2113 - DNA, 20 bp, Homo Sapiens
gctcagaccaccaagcacaa

SEQ ID NO: 2114 - DNA, 20 bp, Homo Sapiens
ctcagaccaccaagcacaag

SEQ ID NO: 2115 - DNA, 20 bp, Homo Sapiens
tcagaccaccaagcacaagt

SEQ ID NO: 2116 - DNA, 20 bp, Homo Sapiens
cagaccaccaagcacaagtg

SEQ ID NO: 2117 - DNA, 20 bp, Homo Sapiens
agaccaccaagcacaagtgg

SEQ ID NO: 2118 - DNA, 20 bp, Homo Sapiens
accaccaagcacaagtggga

SEQ ID NO: 2119 - DNA, 20 bp, Homo Sapiens
atgtggcggagcagttgaga

SEQ ID NO: 2120 - DNA, 20 bp, Homo Sapiens
gagcagttgagagcctacct

SEQ ID NO: 2121 - DNA, 20 bp, Homo Sapiens
agcagttgagagcctacctg

SEQ ID NO: 2122 - DNA, 20 bp, Homo Sapiens
cagttgagagcctacctgga

SEQ ID NO: 2123 - DNA, 20 bp, Homo Sapiens
agttgagagcctacctggag

SEQ ID NO: 2124 - DNA, 20 bp, Homo Sapiens
ctccgcagatacctggagaa

SEQ ID NO: 2125 - DNA, 20 bp, Homo Sapiens
tccgcagatacctggagaac

SEQ ID NO: 2126 - DNA, 20 bp, Homo Sapiens
cagatacctggagaacggga

SEQ ID NO: 2127 - DNA, 20 bp, Homo Sapiens
agatacctggagaacgggaa

SEQ ID NO: 2128 - DNA, 20 bp, Homo Sapiens
atacctggagaacgggaagg

SEQ ID NO: 2129 - DNA, 20 bp, Homo Sapiens
tacctggagaacgggaagga

SEQ ID NO: 2130 - DNA, 20 bp, Homo Sapiens
aaacgcatatgactcaccac

SEQ ID NO: 2131 - DNA, 20 bp, Homo Sapiens
aacgcatatgactcaccacg

SEQ ID NO: 2132 - DNA, 20 bp, Homo Sapiens
acgcatatgactcaccacgc

SEQ ID NO: 2133 - DNA, 20 bp, Homo Sapiens
cgcatatgactcaccacgct

SEQ ID NO: 2134 - DNA, 20 bp, Homo Sapiens
gcatatgactcaccacgctg

SEQ ID NO: 2135 - DNA, 20 bp, Homo Sapiens
catatgactcaccacgctgt

SEQ ID NO: 2136 - DNA, 20 bp, Homo Sapiens
atatgactcaccacgctgtc

SEQ ID NO: 2137 - DNA, 20 bp, Homo Sapiens
tatgactcaccacgctgtct

SEQ ID NO: 2138 - DNA, 20 bp, Homo Sapiens
atgactcaccacgctgtctc

SEQ ID NO: 2139 - DNA, 20 bp, Homo Sapiens
tgactcaccacgctgtctct

SEQ ID NO: 2140 - DNA, 20 bp, Homo Sapiens
actcaccacgctgtctctga

SEQ ID NO: 2141 - DNA, 20 bp, Homo Sapiens
accacgctgtctctgaccat

SEQ ID NO: 2142 - DNA, 20 bp, Homo Sapiens
cacgctgtctctgaccatga

SEQ ID NO: 2143 - DNA, 20 bp, Homo Sapiens
acgctgtctctgaccatgaa

SEQ ID NO: 2144 - DNA, 20 bp, Homo Sapiens
cgctgtctctgaccatgaag

SEQ ID NO: 2145 - DNA, 20 bp, Homo Sapiens
gctgtctctgaccatgaagc

SEQ ID NO: 2146 - DNA, 20 bp, Homo Sapiens
ctgtctctgaccatgaagcc

SEQ ID NO: 2147 - DNA, 20 bp, Homo Sapiens
tgtctctgaccatgaagcca

SEQ ID NO: 2148 - DNA, 20 bp, Homo Sapiens
gtctctgaccatgaagccac

SEQ ID NO: 2149 - DNA, 20 bp, Homo Sapiens
tctctgaccatgaagccacc

SEQ ID NO: 2150 - DNA, 20 bp, Homo Sapiens
tctgaccatgaagccaccct

SEQ ID NO: 2151 - DNA, 20 bp, Homo Sapiens
tgaccatgaagccaccctga

SEQ ID NO: 2152 - DNA, 20 bp, Homo Sapiens
agcttctaccctgcggagat

SEQ ID NO: 2153 - DNA, 20 bp, Homo Sapiens
cttctaccctgcggagatca

SEQ ID NO: 2154 - DNA, 20 bp, Homo Sapiens
ttctaccctgcggagatcac

SEQ ID NO: 2155 - DNA, 20 bp, Homo Sapiens
tctaccctgcggagatcaca

SEQ ID NO: 2156 - DNA, 20 bp, Homo Sapiens
taccctgcggagatcacact

SEQ ID NO: 2157 - DNA, 20 bp, Homo Sapiens
tgcggagatcacactgacct

SEQ ID NO: 2158 - DNA, 20 bp, Homo Sapiens
gagatcacactgacctggca

SEQ ID NO: 2159 - DNA, 20 bp, Homo Sapiens
agatcacactgacctggcag

SEQ ID NO: 2160 - DNA, 20 bp, Homo Sapiens
gggatggaaccttccagaag

SEQ ID NO: 2161 - DNA, 20 bp, Homo Sapiens
ggatggaaccttccagaagt

SEQ ID NO: 2162 - DNA, 20 bp, Homo Sapiens
gatggaaccttccagaagtg

SEQ ID NO: 2163 - DNA, 20 bp, Homo Sapiens
atggaaccttccagaagtgg

SEQ ID NO: 2164 - DNA, 20 bp, Homo Sapiens
tggaaccttccagaagtggg

SEQ ID NO: 2165 - DNA, 20 bp, Homo Sapiens
cttctggacaggagcagaga

SEQ ID NO: 2166 - DNA, 20 bp, Homo Sapiens
ttctggacaggagcagagat

SEQ ID NO: 2167 - DNA, 20 bp, Homo Sapiens
tctggacaggagcagagata

SEQ ID NO: 2168 - DNA, 20 bp, Homo Sapiens
ctggacaggagcagagatac

SEQ ID NO: 2169 - DNA, 20 bp, Homo Sapiens
tggacaggagcagagataca

SEQ ID NO: 2170 - DNA, 20 bp, Homo Sapiens
ggacaggagcagagatacac

SEQ ID NO: 2171 - DNA, 20 bp, Homo Sapiens
gacaggagcagagatacacc

SEQ ID NO: 2172 - DNA, 20 bp, Homo Sapiens
acaggagcagagatacacct

SEQ ID NO: 2173 - DNA, 20 bp, Homo Sapiens
caggagcagagatacacctg

SEQ ID NO: 2174 - DNA, 20 bp, Homo Sapiens
aggagcagagatacacctgc

SEQ ID NO: 2175 - DNA, 20 bp, Homo Sapiens
gagcagagatacacctgcca

SEQ ID NO: 2176 - DNA, 20 bp, Homo Sapiens
agcagagatacacctgccat

SEQ ID NO: 2177 - DNA, 20 bp, Homo Sapiens
gcagagatacacctgccatg

SEQ ID NO: 2178 - DNA, 20 bp, Homo Sapiens
cagagatacacctgccatgt

SEQ ID NO: 2179 - DNA, 20 bp, Homo Sapiens
agagatacacctgccatgtg

SEQ ID NO: 2180 - DNA, 20 bp, Homo Sapiens
gagatacacctgccatgtgc

SEQ ID NO: 2181 - DNA, 20 bp, Homo Sapiens
agatacacctgccatgtgca

SEQ ID NO: 2182 - DNA, 20 bp, Homo Sapiens
gatacacctgccatgtgcag

SEQ ID NO: 2183 - DNA, 20 bp, Homo Sapiens
atacacctgccatgtgcagc

SEQ ID NO: 2184 - DNA, 20 bp, Homo Sapiens
tacacctgccatgtgcagca

SEQ ID NO: 2185 - DNA, 20 bp, Homo Sapiens
acacctgccatgtgcagcat

SEQ ID NO: 2186 - DNA, 20 bp, Homo Sapiens
acctgccatgtgcagcatga

SEQ ID NO: 2187 - DNA, 20 bp, Homo Sapiens
ccatgtgcagcatgagggtt

SEQ ID NO: 2188 - DNA, 20 bp, Homo Sapiens
catgtgcagcatgagggttt

SEQ ID NO: 2189 - DNA, 20 bp, Homo Sapiens
atgtgcagcatgagggtttg

SEQ ID NO: 2190 - DNA, 20 bp, Homo Sapiens
tgtgcagcatgagggtttgc

SEQ ID NO: 2191 - DNA, 20 bp, Homo Sapiens
cagcatgagggtttgcccaa

SEQ ID NO: 2192 - DNA, 20 bp, Homo Sapiens
agcatgagggtttgcccaag

SEQ ID NO: 2193 - DNA, 20 bp, Homo Sapiens
ccatcgtgggcatcattgct

SEQ ID NO: 2194 - DNA, 20 bp, Homo Sapiens
catcgtgggcatcattgctg

SEQ ID NO: 2195 - DNA, 20 bp, Homo Sapiens
atcgtgggcatcattgctgg

SEQ ID NO: 2196 - DNA, 20 bp, Homo Sapiens
gcatcattgctggcctggtt

SEQ ID NO: 2197 - DNA, 20 bp, Homo Sapiens
catcattgctggcctggttc

SEQ ID NO: 2198 - DNA, 20 bp, Homo Sapiens
atcattgctggcctggttct

SEQ ID NO: 2199 - DNA, 20 bp, Homo Sapiens
tcattgctggcctggttctc

SEQ ID NO: 2200 - DNA, 20 bp, Homo Sapiens
cattgctggcctggttctct

SEQ ID NO: 2201 - DNA, 20 bp, Homo Sapiens
attgctggcctggttctctt

SEQ ID NO: 2202 - DNA, 20 bp, Homo Sapiens
ttgctggcctggttctcttt

SEQ ID NO: 2203 - DNA, 20 bp, Homo Sapiens
tgctggcctggttctctttg

SEQ ID NO: 2204 - DNA, 20 bp, Homo Sapiens
ctggcctggttctctttgga

SEQ ID NO: 2205 - DNA, 20 bp, Homo Sapiens
tggcctggttctctttggag

SEQ ID NO: 2206 - DNA, 20 bp, Homo Sapiens
gcctggttctctttggagct

SEQ ID NO: 2207 - DNA, 20 bp, Homo Sapiens
cctggttctctttggagctg

SEQ ID NO: 2208 - DNA, 20 bp, Homo Sapiens
ctggttctctttggagctgt

SEQ ID NO: 2209 - DNA, 20 bp, Homo Sapiens
tggttctctttggagctgtg

SEQ ID NO: 2210 - DNA, 20 bp, Homo Sapiens
ggttctctttggagctgtga

SEQ ID NO: 2211 - DNA, 20 bp, Homo Sapiens
gttctctttggagctgtgat

SEQ ID NO: 2212 - DNA, 20 bp, Homo Sapiens
ttctctttggagctgtgatc

SEQ ID NO: 2213 - DNA, 20 bp, Homo Sapiens
tctctttggagctgtgatca

SEQ ID NO: 2214 - DNA, 20 bp, Homo Sapiens
ctctttggagctgtgatcac

SEQ ID NO: 2215 - DNA, 20 bp, Homo Sapiens
tctttggagctgtgatcact

SEQ ID NO: 2216 - DNA, 20 bp, Homo Sapiens
ctttggagctgtgatcactg

SEQ ID NO: 2217 - DNA, 20 bp, Homo Sapiens
tttggagctgtgatcactgg

SEQ ID NO: 2218 - DNA, 20 bp, Homo Sapiens
ttggagctgtgatcactgga

SEQ ID NO: 2219 - DNA, 20 bp, Homo Sapiens
tggagctgtgatcactggag

SEQ ID NO: 2220 - DNA, 20 bp, Homo Sapiens
gagctgtgatcactggagct

SEQ ID NO: 2221 - DNA, 20 bp, Homo Sapiens
agctgtgatcactggagctg

SEQ ID NO: 2222 - DNA, 20 bp, Homo Sapiens
gctgtgatcactggagctgt

SEQ ID NO: 2223 - DNA, 20 bp, Homo Sapiens
ctgtgatcactggagctgtg

SEQ ID NO: 2224 - DNA, 20 bp, Homo Sapiens
tgtgatcactggagctgtgg

SEQ ID NO: 2225 - DNA, 20 bp, Homo Sapiens
gtgatcactggagctgtggt

SEQ ID NO: 2226 - DNA, 20 bp, Homo Sapiens
tgatcactggagctgtggtc

SEQ ID NO: 2227 - DNA, 20 bp, Homo Sapiens
tgtggtcgctgctgtgatgt

SEQ ID NO: 2228 - DNA, 20 bp, Homo Sapiens
tgctgtgatgtggaggagga

SEQ ID NO: 2229 - DNA, 20 bp, Homo Sapiens
gctgtgatgtggaggaggaa

SEQ ID NO: 2230 - DNA, 20 bp, Homo Sapiens
ctgtgatgtggaggaggaag

SEQ ID NO: 2231 - DNA, 20 bp, Homo Sapiens
tgtgatgtggaggaggaaga

SEQ ID NO: 2232 - DNA, 20 bp, Homo Sapiens
gtgatgtggaggaggaagag

SEQ ID NO: 2233 - DNA, 20 bp, Homo Sapiens
tgatgtggaggaggaagagc

SEQ ID NO: 2234 - DNA, 20 bp, Homo Sapiens
gatgtggaggaggaagagct

SEQ ID NO: 2235 - DNA, 20 bp, Homo Sapiens
atgtggaggaggaagagctc

SEQ ID NO: 2236 - DNA, 20 bp, Homo Sapiens
tgtggaggaggaagagctca

SEQ ID NO: 2237 - DNA, 20 bp, Homo Sapiens
tggaggaggaagagctcaga

SEQ ID NO: 2238 - DNA, 20 bp, Homo Sapiens
ggaggaggaagagctcagat

SEQ ID NO: 2239 - DNA, 20 bp, Homo Sapiens
gaggaggaagagctcagata

SEQ ID NO: 2240 - DNA, 20 bp, Homo Sapiens
aggaggaagagctcagatag

SEQ ID NO: 2241 - DNA, 20 bp, Homo Sapiens
ggaggaagagctcagataga

SEQ ID NO: 2242 - DNA, 20 bp, Homo Sapiens
gaggaagagctcagatagaa

SEQ ID NO: 2243 - DNA, 20 bp, Homo Sapiens
aggaagagctcagatagaaa

SEQ ID NO: 2244 - DNA, 20 bp, Homo Sapiens
aaaggagggagctactctca

SEQ ID NO: 2245 - DNA, 20 bp, Homo Sapiens
aaggagggagctactctcag

SEQ ID NO: 2246 - DNA, 20 bp, Homo Sapiens
gagctactctcaggctgcaa

SEQ ID NO: 2247 - DNA, 20 bp, Homo Sapiens
agctactctcaggctgcaag

SEQ ID NO: 2248 - DNA, 20 bp, Homo Sapiens
ctactctcaggctgcaagca

SEQ ID NO: 2249 - DNA, 20 bp, Homo Sapiens
tactctcaggctgcaagcag

SEQ ID NO: 2250 - DNA, 20 bp, Homo Sapiens
actctcaggctgcaagcagt

SEQ ID NO: 2251 - DNA, 20 bp, Homo Sapiens
tctcaggctgcaagcagtga

SEQ ID NO: 2252 - DNA, 20 bp, Homo Sapiens
tcaggctgcaagcagtgaca

SEQ ID NO: 2253 - DNA, 20 bp, Homo Sapiens
aggctgcaagcagtgacagt

SEQ ID NO: 2254 - DNA, 20 bp, Homo Sapiens
cagggctctgatgtgtctct

SEQ ID NO: 2255 - DNA, 20 bp, Homo Sapiens
agggctctgatgtgtctctc

SEQ ID NO: 2256 - DNA, 20 bp, Homo Sapiens
gggctctgatgtgtctctca

SEQ ID NO: 2257 - DNA, 20 bp, Homo Sapiens
ggctctgatgtgtctctcac

SEQ ID NO: 2258 - DNA, 20 bp, Homo Sapiens
gctctgatgtgtctctcaca

SEQ ID NO: 2259 - DNA, 20 bp, Homo Sapiens
ctctgatgtgtctctcacag

SEQ ID NO: 2260 - DNA, 20 bp, Homo Sapiens
tctgatgtgtctctcacagc

SEQ ID NO: 2261 - DNA, 20 bp, Homo Sapiens
ctgatgtgtctctcacagct

SEQ ID NO: 2262 - DNA, 20 bp, Homo Sapiens
tgatgtgtctctcacagctt

SEQ ID NO: 2263 - DNA, 20 bp, Homo Sapiens
gatgtgtctctcacagcttg

SEQ ID NO: 2264 - DNA, 20 bp, Homo Sapiens
atgtgtctctcacagcttgt

SEQ ID NO: 2265 - DNA, 20 bp, Homo Sapiens
tgtgtctctcacagcttgta

SEQ ID NO: 2266 - DNA, 20 bp, Homo Sapiens
gtgtctctcacagcttgtaa

SEQ ID NO: 2267 - DNA, 20 bp, Homo Sapiens
tgtctctcacagcttgtaaa

SEQ ID NO: 2268 - DNA, 20 bp, Homo Sapiens
gtctctcacagcttgtaaag

SEQ ID NO: 2269 - DNA, 20 bp, Homo Sapiens
tctctcacagcttgtaaagt

SEQ ID NO: 2270 - DNA, 20 bp, Homo Sapiens
ctctcacagcttgtaaagtg

SEQ ID NO: 2271 - DNA, 20 bp, Homo Sapiens
tctcacagcttgtaaagtgt

SEQ ID NO: 2272 - DNA, 20 bp, Homo Sapiens
ctcacagcttgtaaagtgtg

SEQ ID NO: 2273 - DNA, 20 bp, Homo Sapiens
tcacagcttgtaaagtgtga

SEQ ID NO: 2274 - DNA, 20 bp, Homo Sapiens
cacagcttgtaaagtgtgag

SEQ ID NO: 2275 - DNA, 20 bp, Homo Sapiens
acagcttgtaaagtgtgaga

SEQ ID NO: 2276 - DNA, 20 bp, Homo Sapiens
cagcttgtaaagtgtgagac

SEQ ID NO: 2277 - DNA, 20 bp, Homo Sapiens
agcttgtaaagtgtgagaca

SEQ ID NO: 2278 - DNA, 20 bp, Homo Sapiens
gcttgtaaagtgtgagacag

SEQ ID NO: 2279 - DNA, 20 bp, Homo Sapiens
cttgtaaagtgtgagacagc

SEQ ID NO: 2280 - DNA, 20 bp, Homo Sapiens
ttgtaaagtgtgagacagct

SEQ ID NO: 2281 - DNA, 20 bp, Homo Sapiens
tgtaaagtgtgagacagctg

SEQ ID NO: 2282 - DNA, 20 bp, Homo Sapiens
gtaaagtgtgagacagctgc

SEQ ID NO: 2283 - DNA, 20 bp, Homo Sapiens
taaagtgtgagacagctgcc

SEQ ID NO: 2284 - DNA, 20 bp, Homo Sapiens
aaagtgtgagacagctgcct

SEQ ID NO: 2285 - DNA, 20 bp, Homo Sapiens
aagtgtgagacagctgcctt

SEQ ID NO: 2286 - DNA, 20 bp, Homo Sapiens
agtgtgagacagctgccttg

SEQ ID NO: 2287 - DNA, 20 bp, Homo Sapiens
gtgtgagacagctgccttgt

SEQ ID NO: 2288 - DNA, 20 bp, Homo Sapiens
tgtgagacagctgccttgtg

SEQ ID NO: 2289 - DNA, 20 bp, Homo Sapiens
gtgagacagctgccttgtgt

SEQ ID NO: 2290 - DNA, 20 bp, Homo Sapiens
tgagacagctgccttgtgtg

SEQ ID NO: 2291 - DNA, 20 bp, Homo Sapiens
tgccttgtgtgggactgaga

SEQ ID NO: 2292 - DNA, 20 bp, Homo Sapiens
ttgtgtgggactgagaggca

SEQ ID NO: 2293 - DNA, 20 bp, Homo Sapiens
tgtgtgggactgagaggcaa

SEQ ID NO: 2294 - DNA, 20 bp, Homo Sapiens
tgtgggactgagaggcaaga

SEQ ID NO: 2295 - DNA, 20 bp, Homo Sapiens
tgggactgagaggcaagagt

SEQ ID NO: 2296 - DNA, 20 bp, Homo Sapiens
gggactgagaggcaagagtt

SEQ ID NO: 2297 - DNA, 20 bp, Homo Sapiens
ggactgagaggcaagagttg

SEQ ID NO: 2298 - DNA, 20 bp, Homo Sapiens
gactgagaggcaagagttgt

SEQ ID NO: 2299 - DNA, 20 bp, Homo Sapiens
actgagaggcaagagttgtt

SEQ ID NO: 2300 - DNA, 20 bp, Homo Sapiens
ctgagaggcaagagttgttc

SEQ ID NO: 2301 - DNA, 20 bp, Homo Sapiens
tgagaggcaagagttgttcc

SEQ ID NO: 2302 - DNA, 20 bp, Homo Sapiens
gagaggcaagagttgttcct

SEQ ID NO: 2303 - DNA, 20 bp, Homo Sapiens
agaggcaagagttgttcctg

SEQ ID NO: 2304 - DNA, 20 bp, Homo Sapiens
gaggcaagagttgttcctgc

SEQ ID NO: 2305 - DNA, 20 bp, Homo Sapiens
aggcaagagttgttcctgcc

SEQ ID NO: 2306 - DNA, 20 bp, Homo Sapiens
gcaagagttgttcctgccct

SEQ ID NO: 2307 - DNA, 20 bp, Homo Sapiens
caagagttgttcctgccctt

SEQ ID NO: 2308 - DNA, 20 bp, Homo Sapiens
aagagttgttcctgcccttc

SEQ ID NO: 2309 - DNA, 20 bp, Homo Sapiens
agagttgttcctgcccttcc

SEQ ID NO: 2310 - DNA, 20 bp, Homo Sapiens
agttgttcctgcccttccct

SEQ ID NO: 2311 - DNA, 20 bp, Homo Sapiens
gttgttcctgcccttccctt

SEQ ID NO: 2312 - DNA, 20 bp, Homo Sapiens
ttgttcctgcccttcccttt

SEQ ID NO: 2313 - DNA, 20 bp, Homo Sapiens
tgttcctgcccttccctttg

SEQ ID NO: 2314 - DNA, 20 bp, Homo Sapiens
gttcctgcccttccctttgt

SEQ ID NO: 2315 - DNA, 20 bp, Homo Sapiens
ttcctgcccttccctttgtg

SEQ ID NO: 2316 - DNA, 20 bp, Homo Sapiens
tcctgcccttccctttgtga

SEQ ID NO: 2317 - DNA, 20 bp, Homo Sapiens
ctgcccttccctttgtgact

SEQ ID NO: 2318 - DNA, 20 bp, Homo Sapiens
tgcccttccctttgtgactt

SEQ ID NO: 2319 - DNA, 20 bp, Homo Sapiens
gcccttccctttgtgacttg

SEQ ID NO: 2320 - DNA, 20 bp, Homo Sapiens
cccttccctttgtgacttga

SEQ ID NO: 2321 - DNA, 20 bp, Homo Sapiens
ccttccctttgtgacttgaa

SEQ ID NO: 2322 - DNA, 20 bp, Homo Sapiens
cttccctttgtgacttgaag

SEQ ID NO: 2323 - DNA, 20 bp, Homo Sapiens
ttccctttgtgacttgaaga

SEQ ID NO: 2324 - DNA, 20 bp, Homo Sapiens
tccctttgtgacttgaagaa

SEQ ID NO: 2325 - DNA, 20 bp, Homo Sapiens
ccctttgtgacttgaagaac

SEQ ID NO: 2326 - DNA, 20 bp, Homo Sapiens
cctttgtgacttgaagaacc

SEQ ID NO: 2327 - DNA, 20 bp, Homo Sapiens
ctttgtgacttgaagaaccc

SEQ ID NO: 2328 - DNA, 20 bp, Homo Sapiens
tttgtgacttgaagaaccct

SEQ ID NO: 2329 - DNA, 20 bp, Homo Sapiens
ttgtgacttgaagaaccctg

SEQ ID NO: 2330 - DNA, 20 bp, Homo Sapiens
tgtgacttgaagaaccctga

SEQ ID NO: 2331 - DNA, 20 bp, Homo Sapiens
gtgacttgaagaaccctgac

SEQ ID NO: 2332 - DNA, 20 bp, Homo Sapiens
tgacttgaagaaccctgact

SEQ ID NO: 2333 - DNA, 20 bp, Homo Sapiens
gacttgaagaaccctgactt

SEQ ID NO: 2334 - DNA, 20 bp, Homo Sapiens
acttgaagaaccctgacttt

SEQ ID NO: 2335 - DNA, 20 bp, Homo Sapiens
cttgaagaaccctgactttg

SEQ ID NO: 2336 - DNA, 20 bp, Homo Sapiens
ttgaagaaccctgactttgt

SEQ ID NO: 2337 - DNA, 20 bp, Homo Sapiens
tgaagaaccctgactttgtt

SEQ ID NO: 2338 - DNA, 20 bp, Homo Sapiens
gaagaaccctgactttgttt

SEQ ID NO: 2339 - DNA, 20 bp, Homo Sapiens
aagaaccctgactttgtttc

SEQ ID NO: 2340 - DNA, 20 bp, Homo Sapiens
agaaccctgactttgtttct

SEQ ID NO: 2341 - DNA, 20 bp, Homo Sapiens
gaaccctgactttgtttctg

SEQ ID NO: 2342 - DNA, 20 bp, Homo Sapiens
aaccctgactttgtttctgc

SEQ ID NO: 2343 - DNA, 20 bp, Homo Sapiens
accctgactttgtttctgca

SEQ ID NO: 2344 - DNA, 20 bp, Homo Sapiens
ccctgactttgtttctgcaa

SEQ ID NO: 2345 - DNA, 20 bp, Homo Sapiens
cctgactttgtttctgcaaa

SEQ ID NO: 2346 - DNA, 20 bp, Homo Sapiens
ctgactttgtttctgcaaag

SEQ ID NO: 2347 - DNA, 20 bp, Homo Sapiens
tgactttgtttctgcaaagg

SEQ ID NO: 2348 - DNA, 20 bp, Homo Sapiens
gactttgtttctgcaaaggc

SEQ ID NO: 2349 - DNA, 20 bp, Homo Sapiens
actttgtttctgcaaaggca

SEQ ID NO: 2350 - DNA, 20 bp, Homo Sapiens
ctttgtttctgcaaaggcac

SEQ ID NO: 2351 - DNA, 20 bp, Homo Sapiens
tttgtttctgcaaaggcacc

SEQ ID NO: 2352 - DNA, 20 bp, Homo Sapiens
ttgtttctgcaaaggcacct

SEQ ID NO: 2353 - DNA, 20 bp, Homo Sapiens
tgtttctgcaaaggcacctg

SEQ ID NO: 2354 - DNA, 20 bp, Homo Sapiens
gtttctgcaaaggcacctgc

SEQ ID NO: 2355 - DNA, 20 bp, Homo Sapiens
tttctgcaaaggcacctgca

SEQ ID NO: 2356 - DNA, 20 bp, Homo Sapiens
ttctgcaaaggcacctgcat

SEQ ID NO: 2357 - DNA, 20 bp, Homo Sapiens
tctgcaaaggcacctgcatg

SEQ ID NO: 2358 - DNA, 20 bp, Homo Sapiens
ctgcaaaggcacctgcatgt

SEQ ID NO: 2359 - DNA, 20 bp, Homo Sapiens
tgcaaaggcacctgcatgtg

SEQ ID NO: 2360 - DNA, 20 bp, Homo Sapiens
gcaaaggcacctgcatgtgt

SEQ ID NO: 2361 - DNA, 20 bp, Homo Sapiens
caaaggcacctgcatgtgtc

SEQ ID NO: 2362 - DNA, 20 bp, Homo Sapiens
aaaggcacctgcatgtgtct

SEQ ID NO: 2363 - DNA, 20 bp, Homo Sapiens
aaggcacctgcatgtgtctg

SEQ ID NO: 2364 - DNA, 20 bp, Homo Sapiens
aggcacctgcatgtgtctgt

SEQ ID NO: 2365 - DNA, 20 bp, Homo Sapiens
gcacctgcatgtgtctgtgt

SEQ ID NO: 2366 - DNA, 20 bp, Homo Sapiens
cacctgcatgtgtctgtgtt

SEQ ID NO: 2367 - DNA, 20 bp, Homo Sapiens
acctgcatgtgtctgtgttc

SEQ ID NO: 2368 - DNA, 20 bp, Homo Sapiens
cctgcatgtgtctgtgttcg

SEQ ID NO: 2369 - DNA, 20 bp, Homo Sapiens
ctgcatgtgtctgtgttcgt

SEQ ID NO: 2370 - DNA, 20 bp, Homo Sapiens
tgcatgtgtctgtgttcgtg

SEQ ID NO: 2371 - DNA, 20 bp, Homo Sapiens
gcatgtgtctgtgttcgtgt

SEQ ID NO: 2372 - DNA, 20 bp, Homo Sapiens
catgtgtctgtgttcgtgta

SEQ ID NO: 2373 - DNA, 20 bp, Homo Sapiens
atgtgtctgtgttcgtgtag

SEQ ID NO: 2374 - DNA, 20 bp, Homo Sapiens
tgtgtctgtgttcgtgtagg

SEQ ID NO: 2375 - DNA, 20 bp, Homo Sapiens
gtgtctgtgttcgtgtaggc

SEQ ID NO: 2376 - DNA, 20 bp, Homo Sapiens
tgtctgtgttcgtgtaggca

SEQ ID NO: 2377 - DNA, 20 bp, Homo Sapiens
gtctgtgttcgtgtaggcat

SEQ ID NO: 2378 - DNA, 20 bp, Homo Sapiens
tctgtgttcgtgtaggcata

SEQ ID NO: 2379 - DNA, 20 bp, Homo Sapiens
ctgtgttcgtgtaggcataa

SEQ ID NO: 2380 - DNA, 20 bp, Homo Sapiens
tgtgttcgtgtaggcataat

SEQ ID NO: 2381 - DNA, 20 bp, Homo Sapiens
gtgttcgtgtaggcataatg

SEQ ID NO: 2382 - DNA, 20 bp, Homo Sapiens
tgttcgtgtaggcataatgt

SEQ ID NO: 2383 - DNA, 20 bp, Homo Sapiens
gttcgtgtaggcataatgtg

SEQ ID NO: 2384 - DNA, 20 bp, Homo Sapiens
ttcgtgtaggcataatgtga

SEQ ID NO: 2385 - DNA, 20 bp, Homo Sapiens
tcgtgtaggcataatgtgag

SEQ ID NO: 2386 - DNA, 20 bp, Homo Sapiens
cgtgtaggcataatgtgagg

SEQ ID NO: 2387 - DNA, 20 bp, Homo Sapiens
gtgtaggcataatgtgagga

SEQ ID NO: 2388 - DNA, 20 bp, Homo Sapiens
tgtaggcataatgtgaggag

SEQ ID NO: 2389 - DNA, 20 bp, Homo Sapiens
gtaggcataatgtgaggagg

SEQ ID NO: 2390 - DNA, 20 bp, Homo Sapiens
taggcataatgtgaggaggt

SEQ ID NO: 2391 - DNA, 20 bp, Homo Sapiens
aggcataatgtgaggaggtg

SEQ ID NO: 2392 - DNA, 20 bp, Homo Sapiens
ggcataatgtgaggaggtgg

SEQ ID NO: 2393 - DNA, 20 bp, Homo Sapiens
gcataatgtgaggaggtggg

SEQ ID NO: 2394 - DNA, 20 bp, Homo Sapiens
catgtccaccatgaccctct

SEQ ID NO: 2395 - DNA, 20 bp, Homo Sapiens
atgtccaccatgaccctctt

SEQ ID NO: 2396 - DNA, 20 bp, Homo Sapiens
tgtccaccatgaccctcttc

SEQ ID NO: 2397 - DNA, 20 bp, Homo Sapiens
cccaatcatctttcctgttc

SEQ ID NO: 2398 - DNA, 20 bp, Homo Sapiens
ccaatcatctttcctgttcc

SEQ ID NO: 2399 - DNA, 20 bp, Homo Sapiens
caatcatctttcctgttcca

SEQ ID NO: 2400 - DNA, 20 bp, Homo Sapiens
aatcatctttcctgttccag

SEQ ID NO: 2401 - DNA, 20 bp, Homo Sapiens
atcatctttcctgttccaga

SEQ ID NO: 2402 - DNA, 20 bp, Homo Sapiens
tcatctttcctgttccagag

SEQ ID NO: 2403 - DNA, 20 bp, Homo Sapiens
catctttcctgttccagaga

SEQ ID NO: 2404 - DNA, 20 bp, Homo Sapiens
atctttcctgttccagagag

SEQ ID NO: 2405 - DNA, 20 bp, Homo Sapiens
tctttcctgttccagagagg

SEQ ID NO: 2406 - DNA, 20 bp, Homo Sapiens
ctttcctgttccagagaggt

SEQ ID NO: 2407 - DNA, 20 bp, Homo Sapiens
tttcctgttccagagaggtg

SEQ ID NO: 2408 - DNA, 20 bp, Homo Sapiens
ttcctgttccagagaggtgg

SEQ ID NO: 2409 - DNA, 20 bp, Homo Sapiens
gctgaggtgtctccatctct

SEQ ID NO: 2410 - DNA, 20 bp, Homo Sapiens
ctgaggtgtctccatctctg

SEQ ID NO: 2411 - DNA, 20 bp, Homo Sapiens
tgaggtgtctccatctctgt

SEQ ID NO: 2412 - DNA, 20 bp, Homo Sapiens
gaggtgtctccatctctgtc

SEQ ID NO: 2413 - DNA, 20 bp, Homo Sapiens
aggtgtctccatctctgtct

SEQ ID NO: 2414 - DNA, 20 bp, Homo Sapiens
ggtgtctccatctctgtctc

SEQ ID NO: 2415 - DNA, 20 bp, Homo Sapiens
gtgtctccatctctgtctca

SEQ ID NO: 2416 - DNA, 20 bp, Homo Sapiens
tgtctccatctctgtctcaa

SEQ ID NO: 2417 - DNA, 20 bp, Homo Sapiens
gtctccatctctgtctcaac

SEQ ID NO: 2418 - DNA, 20 bp, Homo Sapiens
tctccatctctgtctcaact

SEQ ID NO: 2419 - DNA, 20 bp, Homo Sapiens
ctccatctctgtctcaactt

SEQ ID NO: 2420 - DNA, 20 bp, Homo Sapiens
tccatctctgtctcaacttc

SEQ ID NO: 2421 - DNA, 20 bp, Homo Sapiens
ccatctctgtctcaacttca

SEQ ID NO: 2422 - DNA, 20 bp, Homo Sapiens
catctctgtctcaacttcat

SEQ ID NO: 2423 - DNA, 20 bp, Homo Sapiens
atctctgtctcaacttcatg

SEQ ID NO: 2424 - DNA, 20 bp, Homo Sapiens
tctctgtctcaacttcatgg

SEQ ID NO: 2425 - DNA, 20 bp, Homo Sapiens
ctctgtctcaacttcatggt

SEQ ID NO: 2426 - DNA, 20 bp, Homo Sapiens
tctgtctcaacttcatggtg

SEQ ID NO: 2427 - DNA, 20 bp, Homo Sapiens
ctgtctcaacttcatggtgc

SEQ ID NO: 2428 - DNA, 20 bp, Homo Sapiens
tgtctcaacttcatggtgca

SEQ ID NO: 2429 - DNA, 20 bp, Homo Sapiens
gtctcaacttcatggtgcac

SEQ ID NO: 2430 - DNA, 20 bp, Homo Sapiens
tctcaacttcatggtgcact

SEQ ID NO: 2431 - DNA, 20 bp, Homo Sapiens
ctcaacttcatggtgcactg

SEQ ID NO: 2432 - DNA, 20 bp, Homo Sapiens
tcaacttcatggtgcactga

SEQ ID NO: 2433 - DNA, 20 bp, Homo Sapiens
caacttcatggtgcactgag

SEQ ID NO: 2434 - DNA, 20 bp, Homo Sapiens
aacttcatggtgcactgagc

SEQ ID NO: 2435 - DNA, 20 bp, Homo Sapiens
acttcatggtgcactgagct

SEQ ID NO: 2436 - DNA, 20 bp, Homo Sapiens
cttcatggtgcactgagctg

SEQ ID NO: 2437 - DNA, 20 bp, Homo Sapiens
ttcatggtgcactgagctgt

SEQ ID NO: 2438 - DNA, 20 bp, Homo Sapiens
tcatggtgcactgagctgta

SEQ ID NO: 2439 - DNA, 20 bp, Homo Sapiens
catggtgcactgagctgtaa

SEQ ID NO: 2440 - DNA, 20 bp, Homo Sapiens
atggtgcactgagctgtaac

SEQ ID NO: 2441 - DNA, 20 bp, Homo Sapiens
tggtgcactgagctgtaact

SEQ ID NO: 2442 - DNA, 20 bp, Homo Sapiens
ggtgcactgagctgtaactt

SEQ ID NO: 2443 - DNA, 20 bp, Homo Sapiens
gtgcactgagctgtaacttc

SEQ ID NO: 2444 - DNA, 20 bp, Homo Sapiens
tgcactgagctgtaacttct

SEQ ID NO: 2445 - DNA, 20 bp, Homo Sapiens
gcactgagctgtaacttctt

SEQ ID NO: 2446 - DNA, 20 bp, Homo Sapiens
cactgagctgtaacttcttc

SEQ ID NO: 2447 - DNA, 20 bp, Homo Sapiens
actgagctgtaacttcttcc

SEQ ID NO: 2448 - DNA, 20 bp, Homo Sapiens
ctgagctgtaacttcttcct

SEQ ID NO: 2449 - DNA, 20 bp, Homo Sapiens
tgagctgtaacttcttcctt

SEQ ID NO: 2450 - DNA, 20 bp, Homo Sapiens
gagctgtaacttcttccttc

SEQ ID NO: 2451 - DNA, 20 bp, Homo Sapiens
agctgtaacttcttccttcc

SEQ ID NO: 2452 - DNA, 20 bp, Homo Sapiens
gctgtaacttcttccttccc

SEQ ID NO: 2453 - DNA, 20 bp, Homo Sapiens
ctgtaacttcttccttccct

SEQ ID NO: 2454 - DNA, 20 bp, Homo Sapiens
tgtaacttcttccttcccta

SEQ ID NO: 2455 - DNA, 20 bp, Homo Sapiens
gtaacttcttccttccctat

SEQ ID NO: 2456 - DNA, 20 bp, Homo Sapiens
taacttcttccttccctatt

SEQ ID NO: 2457 - DNA, 20 bp, Homo Sapiens
aacttcttccttccctatta

SEQ ID NO: 2458 - DNA, 20 bp, Homo Sapiens
acttcttccttccctattaa

SEQ ID NO: 2459 - DNA, 20 bp, Homo Sapiens
cttcttccttccctattaaa

SEQ ID NO: 2460 - DNA, 21 bp, Homo Sapiens
cccgaaggcggtgtatggatt

SEQ ID NO: 2461 - DNA, 21 bp, Homo Sapiens
ccgaaggcggtgtatggattg

SEQ ID NO: 2462 - DNA, 21 bp, Homo Sapiens
cgaaggcggtgtatggattgg

SEQ ID NO: 2463 - DNA, 21 bp, Homo Sapiens
gaaggcggtgtatggattggg

SEQ ID NO: 2464 - DNA, 21 bp, Homo Sapiens
ccctctcccaacctatgtagg

SEQ ID NO: 2465 - DNA, 21 bp, Homo Sapiens
cctctcccaacctatgtaggg

SEQ ID NO: 2466 - DNA, 21 bp, Homo Sapiens
ctctcccaacctatgtagggt

SEQ ID NO: 2467 - DNA, 21 bp, Homo Sapiens
tctcccaacctatgtagggtc

SEQ ID NO: 2468 - DNA, 21 bp, Homo Sapiens
ctcccaacctatgtagggtcc

SEQ ID NO: 2469 - DNA, 21 bp, Homo Sapiens
tcccaacctatgtagggtcct

SEQ ID NO: 2470 - DNA, 21 bp, Homo Sapiens
aacctatgtagggtccttctt

SEQ ID NO: 2471 - DNA, 21 bp, Homo Sapiens
atgtagggtccttcttcctgg

SEQ ID NO: 2472 - DNA, 21 bp, Homo Sapiens
tgtagggtccttcttcctgga

SEQ ID NO: 2473 - DNA, 21 bp, Homo Sapiens
ccttcttcctggatactcacg

SEQ ID NO: 2474 - DNA, 21 bp, Homo Sapiens
ttcttcctggatactcacgac

SEQ ID NO: 2475 - DNA, 21 bp, Homo Sapiens
tcttcctggatactcacgacg

SEQ ID NO: 2476 - DNA, 21 bp, Homo Sapiens
cttcctggatactcacgacgc

SEQ ID NO: 2477 - DNA, 21 bp, Homo Sapiens
ttcctggatactcacgacgcg

SEQ ID NO: 2478 - DNA, 21 bp, Homo Sapiens
ggacccagttctcactcccat

SEQ ID NO: 2479 - DNA, 21 bp, Homo Sapiens
cccagttctcactcccattgg

SEQ ID NO: 2480 - DNA, 21 bp, Homo Sapiens
ccagttctcactcccattggg

SEQ ID NO: 2481 - DNA, 21 bp, Homo Sapiens
cagttctcactcccattgggt

SEQ ID NO: 2482 - DNA, 21 bp, Homo Sapiens
agttctcactcccattgggtg

SEQ ID NO: 2483 - DNA, 21 bp, Homo Sapiens
gttctcactcccattgggtgt

SEQ ID NO: 2484 - DNA, 21 bp, Homo Sapiens
tctcactcccattgggtgtcg

SEQ ID NO: 2485 - DNA, 21 bp, Homo Sapiens
actcccattgggtgtcgggtt

SEQ ID NO: 2486 - DNA, 21 bp, Homo Sapiens
ctcccattgggtgtcgggttt

SEQ ID NO: 2487 - DNA, 21 bp, Homo Sapiens
tcccattgggtgtcgggtttc

SEQ ID NO: 2488 - DNA, 21 bp, Homo Sapiens
ccattgggtgtcgggtttcca

SEQ ID NO: 2489 - DNA, 21 bp, Homo Sapiens
cattgggtgtcgggtttccag

SEQ ID NO: 2490 - DNA, 21 bp, Homo Sapiens
ttgggtgtcgggtttccagag

SEQ ID NO: 2491 - DNA, 21 bp, Homo Sapiens
tgggtgtcgggtttccagaga

SEQ ID NO: 2492 - DNA, 21 bp, Homo Sapiens
gggtgtcgggtttccagagaa

SEQ ID NO: 2493 - DNA, 21 bp, Homo Sapiens
ggtgtcgggtttccagagaag

SEQ ID NO: 2494 - DNA, 21 bp, Homo Sapiens
gtgtcgggtttccagagaagc

SEQ ID NO: 2495 - DNA, 21 bp, Homo Sapiens
tgtcgggtttccagagaagcc

SEQ ID NO: 2496 - DNA, 21 bp, Homo Sapiens
gtcgggtttccagagaagcca

SEQ ID NO: 2497 - DNA, 21 bp, Homo Sapiens
cagagaagccaatcagtgtcg

SEQ ID NO: 2498 - DNA, 21 bp, Homo Sapiens
gagaagccaatcagtgtcgtc

SEQ ID NO: 2499 - DNA, 21 bp, Homo Sapiens
agaagccaatcagtgtcgtcg

SEQ ID NO: 2500 - DNA, 21 bp, Homo Sapiens
gaagccaatcagtgtcgtcgc

SEQ ID NO: 2501 - DNA, 21 bp, Homo Sapiens
tcgcggtcgcggttctaaagt

SEQ ID NO: 2502 - DNA, 21 bp, Homo Sapiens
gtcgcggttctaaagtccgca

SEQ ID NO: 2503 - DNA, 21 bp, Homo Sapiens
tcgcggttctaaagtccgcac

SEQ ID NO: 2504 - DNA, 21 bp, Homo Sapiens
cggttctaaagtccgcacgca

SEQ ID NO: 2505 - DNA, 21 bp, Homo Sapiens
ggttctaaagtccgcacgcac

SEQ ID NO: 2506 - DNA, 21 bp, Homo Sapiens
gttctaaagtccgcacgcacc

SEQ ID NO: 2507 - DNA, 21 bp, Homo Sapiens
ttctaaagtccgcacgcaccc

SEQ ID NO: 2508 - DNA, 21 bp, Homo Sapiens
tctaaagtccgcacgcaccca

SEQ ID NO: 2509 - DNA, 21 bp, Homo Sapiens
acccaccgggactcagattct

SEQ ID NO: 2510 - DNA, 21 bp, Homo Sapiens
gaaccctcgtcctgctactct

SEQ ID NO: 2511 - DNA, 21 bp, Homo Sapiens
aaccctcgtcctgctactctc

SEQ ID NO: 2512 - DNA, 21 bp, Homo Sapiens
gggctctcactccatgaggta

SEQ ID NO: 2513 - DNA, 21 bp, Homo Sapiens
tgaggtatttcttcacatccg

SEQ ID NO: 2514 - DNA, 21 bp, Homo Sapiens
gaggtatttcttcacatccgt

SEQ ID NO: 2515 - DNA, 21 bp, Homo Sapiens
aggtatttcttcacatccgtg

SEQ ID NO: 2516 - DNA, 21 bp, Homo Sapiens
ggtatttcttcacatccgtgt

SEQ ID NO: 2517 - DNA, 21 bp, Homo Sapiens
tatttcttcacatccgtgtcc

SEQ ID NO: 2518 - DNA, 21 bp, Homo Sapiens
atttcttcacatccgtgtccc

SEQ ID NO: 2519 - DNA, 21 bp, Homo Sapiens
tttcttcacatccgtgtcccg

SEQ ID NO: 2520 - DNA, 21 bp, Homo Sapiens
ttcttcacatccgtgtcccgg

SEQ ID NO: 2521 - DNA, 21 bp, Homo Sapiens
cttcatcgcagtgggctacgt

SEQ ID NO: 2522 - DNA, 21 bp, Homo Sapiens
ttcatcgcagtgggctacgtg

SEQ ID NO: 2523 - DNA, 21 bp, Homo Sapiens
ctacgtggacgacacgcagtt

SEQ ID NO: 2524 - DNA, 21 bp, Homo Sapiens
tacgtggacgacacgcagttc

SEQ ID NO: 2525 - DNA, 21 bp, Homo Sapiens
gggagacacggaaagtgaagg

SEQ ID NO: 2526 - DNA, 21 bp, Homo Sapiens
ggagacacggaaagtgaaggc

SEQ ID NO: 2527 - DNA, 21 bp, Homo Sapiens
gagacacggaaagtgaaggcc

SEQ ID NO: 2528 - DNA, 21 bp, Homo Sapiens
agacacggaaagtgaaggccc

SEQ ID NO: 2529 - DNA, 21 bp, Homo Sapiens
gacacggaaagtgaaggccca

SEQ ID NO: 2530 - DNA, 21 bp, Homo Sapiens
acacggaaagtgaaggcccac

SEQ ID NO: 2531 - DNA, 21 bp, Homo Sapiens
cacggaaagtgaaggcccact

SEQ ID NO: 2532 - DNA, 21 bp, Homo Sapiens
acggaaagtgaaggcccactc

SEQ ID NO: 2533 - DNA, 21 bp, Homo Sapiens
cggaaagtgaaggcccactca

SEQ ID NO: 2534 - DNA, 21 bp, Homo Sapiens
ggaaagtgaaggcccactcac

SEQ ID NO: 2535 - DNA, 21 bp, Homo Sapiens
aaagtgaaggcccactcacag

SEQ ID NO: 2536 - DNA, 21 bp, Homo Sapiens
aagtgaaggcccactcacaga

SEQ ID NO: 2537 - DNA, 21 bp, Homo Sapiens
agtgaaggcccactcacagac

SEQ ID NO: 2538 - DNA, 21 bp, Homo Sapiens
gtgaaggcccactcacagact

SEQ ID NO: 2539 - DNA, 21 bp, Homo Sapiens
tgaaggcccactcacagactc

SEQ ID NO: 2540 - DNA, 21 bp, Homo Sapiens
gaaggcccactcacagactca

SEQ ID NO: 2541 - DNA, 21 bp, Homo Sapiens
aaggcccactcacagactcac

SEQ ID NO: 2542 - DNA, 21 bp, Homo Sapiens
ccactcacagactcaccgagt

SEQ ID NO: 2543 - DNA, 21 bp, Homo Sapiens
cactcacagactcaccgagtg

SEQ ID NO: 2544 - DNA, 21 bp, Homo Sapiens
actcacagactcaccgagtgg

SEQ ID NO: 2545 - DNA, 21 bp, Homo Sapiens
ctcacagactcaccgagtgga

SEQ ID NO: 2546 - DNA, 21 bp, Homo Sapiens
tcacagactcaccgagtggac

SEQ ID NO: 2547 - DNA, 21 bp, Homo Sapiens
acagactcaccgagtggacct

SEQ ID NO: 2548 - DNA, 21 bp, Homo Sapiens
cggctactacaaccagagcga

SEQ ID NO: 2549 - DNA, 21 bp, Homo Sapiens
ggctactacaaccagagcgag

SEQ ID NO: 2550 - DNA, 21 bp, Homo Sapiens
gctactacaaccagagcgagg

SEQ ID NO: 2551 - DNA, 21 bp, Homo Sapiens
ctactacaaccagagcgaggc

SEQ ID NO: 2552 - DNA, 21 bp, Homo Sapiens
tactacaaccagagcgaggcc

SEQ ID NO: 2553 - DNA, 21 bp, Homo Sapiens
gttctcacaccgtccagagga

SEQ ID NO: 2554 - DNA, 21 bp, Homo Sapiens
tctcacaccgtccagaggatg

SEQ ID NO: 2555 - DNA, 21 bp, Homo Sapiens
ctcacaccgtccagaggatgt

SEQ ID NO: 2556 - DNA, 21 bp, Homo Sapiens
caccgtccagaggatgtatgg

SEQ ID NO: 2557 - DNA, 21 bp, Homo Sapiens
accgtccagaggatgtatggc

SEQ ID NO: 2558 - DNA, 21 bp, Homo Sapiens
ccgtccagaggatgtatggct

SEQ ID NO: 2559 - DNA, 21 bp, Homo Sapiens
cgtccagaggatgtatggctg

SEQ ID NO: 2560 - DNA, 21 bp, Homo Sapiens
gtccagaggatgtatggctgc

SEQ ID NO: 2561 - DNA, 21 bp, Homo Sapiens
tccagaggatgtatggctgcg

SEQ ID NO: 2562 - DNA, 21 bp, Homo Sapiens
ccagaggatgtatggctgcga

SEQ ID NO: 2563 - DNA, 21 bp, Homo Sapiens
cagaggatgtatggctgcgac

SEQ ID NO: 2564 - DNA, 21 bp, Homo Sapiens
agaggatgtatggctgcgacg

SEQ ID NO: 2565 - DNA, 21 bp, Homo Sapiens
gaggatgtatggctgcgacgt

SEQ ID NO: 2566 - DNA, 21 bp, Homo Sapiens
aggatgtatggctgcgacgtg

SEQ ID NO: 2567 - DNA, 21 bp, Homo Sapiens
gtaccaccagtacgcctacga

SEQ ID NO: 2568 - DNA, 21 bp, Homo Sapiens
taccaccagtacgcctacgac

SEQ ID NO: 2569 - DNA, 21 bp, Homo Sapiens
tacgcctacgacggcaaggat

SEQ ID NO: 2570 - DNA, 21 bp, Homo Sapiens
acgcctacgacggcaaggatt

SEQ ID NO: 2571 - DNA, 21 bp, Homo Sapiens
cgacggcaaggattacatcgc

SEQ ID NO: 2572 - DNA, 21 bp, Homo Sapiens
gacggcaaggattacatcgcc

SEQ ID NO: 2573 - DNA, 21 bp, Homo Sapiens
acggcaaggattacatcgccc

SEQ ID NO: 2574 - DNA, 21 bp, Homo Sapiens
cggcaaggattacatcgccct

SEQ ID NO: 2575 - DNA, 21 bp, Homo Sapiens
ggcaaggattacatcgccctg

SEQ ID NO: 2576 - DNA, 21 bp, Homo Sapiens
gcaaggattacatcgccctga

SEQ ID NO: 2577 - DNA, 21 bp, Homo Sapiens
aaggattacatcgccctgaaa

SEQ ID NO: 2578 - DNA, 21 bp, Homo Sapiens
tacatcgccctgaaagaggac

SEQ ID NO: 2579 - DNA, 21 bp, Homo Sapiens
acatcgccctgaaagaggacc

SEQ ID NO: 2580 - DNA, 21 bp, Homo Sapiens
catcgccctgaaagaggacct

SEQ ID NO: 2581 - DNA, 21 bp, Homo Sapiens
atcgccctgaaagaggacctg

SEQ ID NO: 2582 - DNA, 21 bp, Homo Sapiens
ctgaaagaggacctgcgctct

SEQ ID NO: 2583 - DNA, 21 bp, Homo Sapiens
tgaaagaggacctgcgctctt

SEQ ID NO: 2584 - DNA, 21 bp, Homo Sapiens
gaaagaggacctgcgctcttg

SEQ ID NO: 2585 - DNA, 21 bp, Homo Sapiens
acatggcagctcagaccacca

SEQ ID NO: 2586 - DNA, 21 bp, Homo Sapiens
catggcagctcagaccaccaa

SEQ ID NO: 2587 - DNA, 21 bp, Homo Sapiens
atggcagctcagaccaccaag

SEQ ID NO: 2588 - DNA, 21 bp, Homo Sapiens
cagctcagaccaccaagcaca

SEQ ID NO: 2589 - DNA, 21 bp, Homo Sapiens
gctcagaccaccaagcacaag

SEQ ID NO: 2590 - DNA, 21 bp, Homo Sapiens
cagaccaccaagcacaagtgg

SEQ ID NO: 2591 - DNA, 21 bp, Homo Sapiens
agaccaccaagcacaagtggg

SEQ ID NO: 2592 - DNA, 21 bp, Homo Sapiens
gaccaccaagcacaagtggga

SEQ ID NO: 2593 - DNA, 21 bp, Homo Sapiens
accaccaagcacaagtgggag

SEQ ID NO: 2594 - DNA, 21 bp, Homo Sapiens
catgtggcggagcagttgaga

SEQ ID NO: 2595 - DNA, 21 bp, Homo Sapiens
atgtggcggagcagttgagag

SEQ ID NO: 2596 - DNA, 21 bp, Homo Sapiens
ggagcagttgagagcctacct

SEQ ID NO: 2597 - DNA, 21 bp, Homo Sapiens
gagcagttgagagcctacctg

SEQ ID NO: 2598 - DNA, 21 bp, Homo Sapiens
agcagttgagagcctacctgg

SEQ ID NO: 2599 - DNA, 21 bp, Homo Sapiens
gcagttgagagcctacctgga

SEQ ID NO: 2600 - DNA, 21 bp, Homo Sapiens
cagttgagagcctacctggag

SEQ ID NO: 2601 - DNA, 21 bp, Homo Sapiens
agttgagagcctacctggagg

SEQ ID NO: 2602 - DNA, 21 bp, Homo Sapiens
gctccgcagatacctggagaa

SEQ ID NO: 2603 - DNA, 21 bp, Homo Sapiens
ctccgcagatacctggagaac

SEQ ID NO: 2604 - DNA, 21 bp, Homo Sapiens
tccgcagatacctggagaacg

SEQ ID NO: 2605 - DNA, 21 bp, Homo Sapiens
gcagatacctggagaacggga

SEQ ID NO: 2606 - DNA, 21 bp, Homo Sapiens
cagatacctggagaacgggaa

SEQ ID NO: 2607 - DNA, 21 bp, Homo Sapiens
gatacctggagaacgggaagg

SEQ ID NO: 2608 - DNA, 21 bp, Homo Sapiens
tacctggagaacgggaaggag

SEQ ID NO: 2609 - DNA, 21 bp, Homo Sapiens
acctggagaacgggaaggaga

SEQ ID NO: 2610 - DNA, 21 bp, Homo Sapiens
aacgcatatgactcaccacgc

SEQ ID NO: 2611 - DNA, 21 bp, Homo Sapiens
acgcatatgactcaccacgct

SEQ ID NO: 2612 - DNA, 21 bp, Homo Sapiens
cgcatatgactcaccacgctg

SEQ ID NO: 2613 - DNA, 21 bp, Homo Sapiens
gcatatgactcaccacgctgt

SEQ ID NO: 2614 - DNA, 21 bp, Homo Sapiens
catatgactcaccacgctgtc

SEQ ID NO: 2615 - DNA, 21 bp, Homo Sapiens
tgactcaccacgctgtctctg

SEQ ID NO: 2616 - DNA, 21 bp, Homo Sapiens
gactcaccacgctgtctctga

SEQ ID NO: 2617 - DNA, 21 bp, Homo Sapiens
actcaccacgctgtctctgac

SEQ ID NO: 2618 - DNA, 21 bp, Homo Sapiens
tcaccacgctgtctctgacca

SEQ ID NO: 2619 - DNA, 21 bp, Homo Sapiens
caccacgctgtctctgaccat

SEQ ID NO: 2620 - DNA, 21 bp, Homo Sapiens
accacgctgtctctgaccatg

SEQ ID NO: 2621 - DNA, 21 bp, Homo Sapiens
ccacgctgtctctgaccatga

SEQ ID NO: 2622 - DNA, 21 bp, Homo Sapiens
cgctgtctctgaccatgaagc

SEQ ID NO: 2623 - DNA, 21 bp, Homo Sapiens
gctgtctctgaccatgaagcc

SEQ ID NO: 2624 - DNA, 21 bp, Homo Sapiens
ctgtctctgaccatgaagcca

SEQ ID NO: 2625 - DNA, 21 bp, Homo Sapiens
tgtctctgaccatgaagccac

SEQ ID NO: 2626 - DNA, 21 bp, Homo Sapiens
gtctctgaccatgaagccacc

SEQ ID NO: 2627 - DNA, 21 bp, Homo Sapiens
tctctgaccatgaagccaccc

SEQ ID NO: 2628 - DNA, 21 bp, Homo Sapiens
ctctgaccatgaagccaccct

SEQ ID NO: 2629 - DNA, 21 bp, Homo Sapiens
tctgaccatgaagccaccctg

SEQ ID NO: 2630 - DNA, 21 bp, Homo Sapiens
ctgaccatgaagccaccctga

SEQ ID NO: 2631 - DNA, 21 bp, Homo Sapiens
tgaccatgaagccaccctgag

SEQ ID NO: 2632 - DNA, 21 bp, Homo Sapiens
accatgaagccaccctgaggt

SEQ ID NO: 2633 - DNA, 21 bp, Homo Sapiens
atgaagccaccctgaggtgct

SEQ ID NO: 2634 - DNA, 21 bp, Homo Sapiens
tgagcttctaccctgcggaga

SEQ ID NO: 2635 - DNA, 21 bp, Homo Sapiens
gagcttctaccctgcggagat

SEQ ID NO: 2636 - DNA, 21 bp, Homo Sapiens
agcttctaccctgcggagatc

SEQ ID NO: 2637 - DNA, 21 bp, Homo Sapiens
gcttctaccctgcggagatca

SEQ ID NO: 2638 - DNA, 21 bp, Homo Sapiens
cttctaccctgcggagatcac

SEQ ID NO: 2639 - DNA, 21 bp, Homo Sapiens
tctaccctgcggagatcacac

SEQ ID NO: 2640 - DNA, 21 bp, Homo Sapiens
ctaccctgcggagatcacact

SEQ ID NO: 2641 - DNA, 21 bp, Homo Sapiens
taccctgcggagatcacactg

SEQ ID NO: 2642 - DNA, 21 bp, Homo Sapiens
accctgcggagatcacactga

SEQ ID NO: 2643 - DNA, 21 bp, Homo Sapiens
ctgcggagatcacactgacct

SEQ ID NO: 2644 - DNA, 21 bp, Homo Sapiens
tgcggagatcacactgacctg

SEQ ID NO: 2645 - DNA, 21 bp, Homo Sapiens
gagatcacactgacctggcag

SEQ ID NO: 2646 - DNA, 21 bp, Homo Sapiens
agatcacactgacctggcagc

SEQ ID NO: 2647 - DNA, 21 bp, Homo Sapiens
atggaaccttccagaagtggg

SEQ ID NO: 2648 - DNA, 21 bp, Homo Sapiens
tggaaccttccagaagtgggc

SEQ ID NO: 2649 - DNA, 21 bp, Homo Sapiens
tgtggtggtgccttctggaca

SEQ ID NO: 2650 - DNA, 21 bp, Homo Sapiens
tgccttctggacaggagcaga

SEQ ID NO: 2651 - DNA, 21 bp, Homo Sapiens
ccttctggacaggagcagaga

SEQ ID NO: 2652 - DNA, 21 bp, Homo Sapiens
ggacaggagcagagatacacc

SEQ ID NO: 2653 - DNA, 21 bp, Homo Sapiens
acaggagcagagatacacctg

SEQ ID NO: 2654 - DNA, 21 bp, Homo Sapiens
caggagcagagatacacctgc

SEQ ID NO: 2655 - DNA, 21 bp, Homo Sapiens
aggagcagagatacacctgcc

SEQ ID NO: 2656 - DNA, 21 bp, Homo Sapiens
ggagcagagatacacctgcca

SEQ ID NO: 2657 - DNA, 21 bp, Homo Sapiens
agcagagatacacctgccatg

SEQ ID NO: 2658 - DNA, 21 bp, Homo Sapiens
agatacacctgccatgtgcag

SEQ ID NO: 2659 - DNA, 21 bp, Homo Sapiens
gatacacctgccatgtgcagc

SEQ ID NO: 2660 - DNA, 21 bp, Homo Sapiens
atacacctgccatgtgcagca

SEQ ID NO: 2661 - DNA, 21 bp, Homo Sapiens
acacctgccatgtgcagcatg

SEQ ID NO: 2662 - DNA, 21 bp, Homo Sapiens
acctgccatgtgcagcatgag

SEQ ID NO: 2663 - DNA, 21 bp, Homo Sapiens
tgccatgtgcagcatgagggt

SEQ ID NO: 2664 - DNA, 21 bp, Homo Sapiens
gccatgtgcagcatgagggtt

SEQ ID NO: 2665 - DNA, 21 bp, Homo Sapiens
tgtgcagcatgagggtttgcc

SEQ ID NO: 2666 - DNA, 21 bp, Homo Sapiens
tgcagcatgagggtttgccca

SEQ ID NO: 2667 - DNA, 21 bp, Homo Sapiens
gcagcatgagggtttgcccaa

SEQ ID NO: 2668 - DNA, 21 bp, Homo Sapiens
cagcatgagggtttgcccaag

SEQ ID NO: 2669 - DNA, 21 bp, Homo Sapiens
agcatgagggtttgcccaagc

SEQ ID NO: 2670 - DNA, 21 bp, Homo Sapiens
cccatcgtgggcatcattgct

SEQ ID NO: 2671 - DNA, 21 bp, Homo Sapiens
ccatcgtgggcatcattgctg

SEQ ID NO: 2672 - DNA, 21 bp, Homo Sapiens
catcgtgggcatcattgctgg

SEQ ID NO: 2673 - DNA, 21 bp, Homo Sapiens
atcgtgggcatcattgctggc

SEQ ID NO: 2674 - DNA, 21 bp, Homo Sapiens
ggcatcattgctggcctggtt

SEQ ID NO: 2675 - DNA, 21 bp, Homo Sapiens
gcatcattgctggcctggttc

SEQ ID NO: 2676 - DNA, 21 bp, Homo Sapiens
tgctggcctggttctctttgg

SEQ ID NO: 2677 - DNA, 21 bp, Homo Sapiens
gctggcctggttctctttgga

SEQ ID NO: 2678 - DNA, 21 bp, Homo Sapiens
ctggcctggttctctttggag

SEQ ID NO: 2679 - DNA, 21 bp, Homo Sapiens
tggcctggttctctttggagc

SEQ ID NO: 2680 - DNA, 21 bp, Homo Sapiens
ggcctggttctctttggagct

SEQ ID NO: 2681 - DNA, 21 bp, Homo Sapiens
gcctggttctctttggagctg

SEQ ID NO: 2682 - DNA, 21 bp, Homo Sapiens
ctggttctctttggagctgtg

SEQ ID NO: 2683 - DNA, 21 bp, Homo Sapiens
ctttggagctgtgatcactgg

SEQ ID NO: 2684 - DNA, 21 bp, Homo Sapiens
ttggagctgtgatcactggag

SEQ ID NO: 2685 - DNA, 21 bp, Homo Sapiens
tggagctgtgatcactggagc

SEQ ID NO: 2686 - DNA, 21 bp, Homo Sapiens
ggagctgtgatcactggagct

SEQ ID NO: 2687 - DNA, 21 bp, Homo Sapiens
gagctgtgatcactggagctg

SEQ ID NO: 2688 - DNA, 21 bp, Homo Sapiens
gctgtgatcactggagctgtg

SEQ ID NO: 2689 - DNA, 21 bp, Homo Sapiens
ctgtgatcactggagctgtgg

SEQ ID NO: 2690 - DNA, 21 bp, Homo Sapiens
gtgatcactggagctgtggtc

SEQ ID NO: 2691 - DNA, 21 bp, Homo Sapiens
tgatcactggagctgtggtcg

SEQ ID NO: 2692 - DNA, 21 bp, Homo Sapiens
atcactggagctgtggtcgct

SEQ ID NO: 2693 - DNA, 21 bp, Homo Sapiens
agctgtggtcgctgctgtgat

SEQ ID NO: 2694 - DNA, 21 bp, Homo Sapiens
ctgtggtcgctgctgtgatgt

SEQ ID NO: 2695 - DNA, 21 bp, Homo Sapiens
tgtggtcgctgctgtgatgtg

SEQ ID NO: 2696 - DNA, 21 bp, Homo Sapiens
tggtcgctgctgtgatgtgga

SEQ ID NO: 2697 - DNA, 21 bp, Homo Sapiens
tcgctgctgtgatgtggagga

SEQ ID NO: 2698 - DNA, 21 bp, Homo Sapiens
ctgctgtgatgtggaggagga

SEQ ID NO: 2699 - DNA, 21 bp, Homo Sapiens
gctgtgatgtggaggaggaag

SEQ ID NO: 2700 - DNA, 21 bp, Homo Sapiens
gtgatgtggaggaggaagagc

SEQ ID NO: 2701 - DNA, 21 bp, Homo Sapiens
gatgtggaggaggaagagctc

SEQ ID NO: 2702 - DNA, 21 bp, Homo Sapiens
tgtggaggaggaagagctcag

SEQ ID NO: 2703 - DNA, 21 bp, Homo Sapiens
gtggaggaggaagagctcaga

SEQ ID NO: 2704 - DNA, 21 bp, Homo Sapiens
aaaggagggagctactctcag

SEQ ID NO: 2705 - DNA, 21 bp, Homo Sapiens
aaggagggagctactctcagg

SEQ ID NO: 2706 - DNA, 21 bp, Homo Sapiens
ggagctactctcaggctgcaa

SEQ ID NO: 2707 - DNA, 21 bp, Homo Sapiens
gagctactctcaggctgcaag

SEQ ID NO: 2708 - DNA, 21 bp, Homo Sapiens
agctactctcaggctgcaagc

SEQ ID NO: 2709 - DNA, 21 bp, Homo Sapiens
gctactctcaggctgcaagca

SEQ ID NO: 2710 - DNA, 21 bp, Homo Sapiens
ctactctcaggctgcaagcag

SEQ ID NO: 2711 - DNA, 21 bp, Homo Sapiens
actctcaggctgcaagcagtg

SEQ ID NO: 2712 - DNA, 21 bp, Homo Sapiens
ctctcaggctgcaagcagtga

SEQ ID NO: 2713 - DNA, 21 bp, Homo Sapiens
tctcaggctgcaagcagtgac

SEQ ID NO: 2714 - DNA, 21 bp, Homo Sapiens
ctcaggctgcaagcagtgaca

SEQ ID NO: 2715 - DNA, 21 bp, Homo Sapiens
tcaggctgcaagcagtgacag

SEQ ID NO: 2716 - DNA, 21 bp, Homo Sapiens
caggctgcaagcagtgacagt

SEQ ID NO: 2717 - DNA, 21 bp, Homo Sapiens
aggctgcaagcagtgacagtg

SEQ ID NO: 2718 - DNA, 21 bp, Homo Sapiens
tgcaagcagtgacagtgccca

SEQ ID NO: 2719 - DNA, 21 bp, Homo Sapiens
ccagggctctgatgtgtctct

SEQ ID NO: 2720 - DNA, 21 bp, Homo Sapiens
cagggctctgatgtgtctctc

SEQ ID NO: 2721 - DNA, 21 bp, Homo Sapiens
gggctctgatgtgtctctcac

SEQ ID NO: 2722 - DNA, 21 bp, Homo Sapiens
ctctgatgtgtctctcacagc

SEQ ID NO: 2723 - DNA, 21 bp, Homo Sapiens
ctcacagcttgtaaagtgtga

SEQ ID NO: 2724 - DNA, 21 bp, Homo Sapiens
tcacagcttgtaaagtgtgag

SEQ ID NO: 2725 - DNA, 21 bp, Homo Sapiens
gcttgtaaagtgtgagacagc

SEQ ID NO: 2726 - DNA, 21 bp, Homo Sapiens
ttgtaaagtgtgagacagctg

SEQ ID NO: 2727 - DNA, 21 bp, Homo Sapiens
tgtaaagtgtgagacagctgc

SEQ ID NO: 2728 - DNA, 21 bp, Homo Sapiens
gtaaagtgtgagacagctgcc

SEQ ID NO: 2729 - DNA, 21 bp, Homo Sapiens
taaagtgtgagacagctgcct

SEQ ID NO: 2730 - DNA, 21 bp, Homo Sapiens
aaagtgtgagacagctgcctt

SEQ ID NO: 2731 - DNA, 21 bp, Homo Sapiens
gtgtgagacagctgccttgtg

SEQ ID NO: 2732 - DNA, 21 bp, Homo Sapiens
gtgagacagctgccttgtgtg

SEQ ID NO: 2733 - DNA, 21 bp, Homo Sapiens
tgagacagctgccttgtgtgg

SEQ ID NO: 2734 - DNA, 21 bp, Homo Sapiens
agacagctgccttgtgtggga

SEQ ID NO: 2735 - DNA, 21 bp, Homo Sapiens
acagctgccttgtgtgggact

SEQ ID NO: 2736 - DNA, 21 bp, Homo Sapiens
agctgccttgtgtgggactga

SEQ ID NO: 2737 - DNA, 21 bp, Homo Sapiens
ctgccttgtgtgggactgaga

SEQ ID NO: 2738 - DNA, 21 bp, Homo Sapiens
tgccttgtgtgggactgagag

SEQ ID NO: 2739 - DNA, 21 bp, Homo Sapiens
cttgtgtgggactgagaggca

SEQ ID NO: 2740 - DNA, 21 bp, Homo Sapiens
tgtgtgggactgagaggcaag

SEQ ID NO: 2741 - DNA, 21 bp, Homo Sapiens
gtgtgggactgagaggcaaga

SEQ ID NO: 2742 - DNA, 21 bp, Homo Sapiens
tgtgggactgagaggcaagag

SEQ ID NO: 2743 - DNA, 21 bp, Homo Sapiens
gtgggactgagaggcaagagt

SEQ ID NO: 2744 - DNA, 21 bp, Homo Sapiens
gggactgagaggcaagagttg

SEQ ID NO: 2745 - DNA, 21 bp, Homo Sapiens
agaggcaagagttgttcctgc

SEQ ID NO: 2746 - DNA, 21 bp, Homo Sapiens
gaggcaagagttgttcctgcc

SEQ ID NO: 2747 - DNA, 21 bp, Homo Sapiens
aggcaagagttgttcctgccc

SEQ ID NO: 2748 - DNA, 21 bp, Homo Sapiens
ggcaagagttgttcctgccct

SEQ ID NO: 2749 - DNA, 21 bp, Homo Sapiens
gcaagagttgttcctgccctt

SEQ ID NO: 2750 - DNA, 21 bp, Homo Sapiens
caagagttgttcctgcccttc

SEQ ID NO: 2751 - DNA, 21 bp, Homo Sapiens
aagagttgttcctgcccttcc

SEQ ID NO: 2752 - DNA, 21 bp, Homo Sapiens
agagttgttcctgcccttccc

SEQ ID NO: 2753 - DNA, 21 bp, Homo Sapiens
gagttgttcctgcccttccct

SEQ ID NO: 2754 - DNA, 21 bp, Homo Sapiens
gttcctgcccttccctttgtg

SEQ ID NO: 2755 - DNA, 21 bp, Homo Sapiens
tcctgcccttccctttgtgac

SEQ ID NO: 2756 - DNA, 21 bp, Homo Sapiens
cctgcccttccctttgtgact

SEQ ID NO: 2757 - DNA, 21 bp, Homo Sapiens
cctttgtgacttgaagaaccc

SEQ ID NO: 2758 - DNA, 21 bp, Homo Sapiens
ctttgtgacttgaagaaccct

SEQ ID NO: 2759 - DNA, 21 bp, Homo Sapiens
tttgtgacttgaagaaccctg

SEQ ID NO: 2760 - DNA, 21 bp, Homo Sapiens
ttgtgacttgaagaaccctga

SEQ ID NO: 2761 - DNA, 21 bp, Homo Sapiens
tgtgacttgaagaaccctgac

SEQ ID NO: 2762 - DNA, 21 bp, Homo Sapiens
aagaaccctgactttgtttct

SEQ ID NO: 2763 - DNA, 21 bp, Homo Sapiens
aaccctgactttgtttctgca

SEQ ID NO: 2764 - DNA, 21 bp, Homo Sapiens
cctgactttgtttctgcaaag

SEQ ID NO: 2765 - DNA, 21 bp, Homo Sapiens
ctgactttgtttctgcaaagg

SEQ ID NO: 2766 - DNA, 21 bp, Homo Sapiens
tgactttgtttctgcaaaggc

SEQ ID NO: 2767 - DNA, 21 bp, Homo Sapiens
gactttgtttctgcaaaggca

SEQ ID NO: 2768 - DNA, 21 bp, Homo Sapiens
actttgtttctgcaaaggcac

SEQ ID NO: 2769 - DNA, 21 bp, Homo Sapiens
ctttgtttctgcaaaggcacc

SEQ ID NO: 2770 - DNA, 21 bp, Homo Sapiens
tttgtttctgcaaaggcacct

SEQ ID NO: 2771 - DNA, 21 bp, Homo Sapiens
ttgtttctgcaaaggcacctg

SEQ ID NO: 2772 - DNA, 21 bp, Homo Sapiens
tgtttctgcaaaggcacctgc

SEQ ID NO: 2773 - DNA, 21 bp, Homo Sapiens
gtttctgcaaaggcacctgca

SEQ ID NO: 2774 - DNA, 21 bp, Homo Sapiens
ctgcaaaggcacctgcatgtg

SEQ ID NO: 2775 - DNA, 21 bp, Homo Sapiens
gcaaaggcacctgcatgtgtc

SEQ ID NO: 2776 - DNA, 21 bp, Homo Sapiens
aggcacctgcatgtgtctgtg

SEQ ID NO: 2777 - DNA, 21 bp, Homo Sapiens
ggcacctgcatgtgtctgtgt

SEQ ID NO: 2778 - DNA, 21 bp, Homo Sapiens
tgtgtctgtgttcgtgtaggc

SEQ ID NO: 2779 - DNA, 21 bp, Homo Sapiens
gtgtctgtgttcgtgtaggca

SEQ ID NO: 2780 - DNA, 21 bp, Homo Sapiens
tcgtgtaggcataatgtgagg

SEQ ID NO: 2781 - DNA, 21 bp, Homo Sapiens
gtgtaggcataatgtgaggag

SEQ ID NO: 2782 - DNA, 21 bp, Homo Sapiens
tgtaggcataatgtgaggagg

SEQ ID NO: 2783 - DNA, 21 bp, Homo Sapiens
gtaggcataatgtgaggaggt

SEQ ID NO: 2784 - DNA, 21 bp, Homo Sapiens
taggcataatgtgaggaggtg

SEQ ID NO: 2785 - DNA, 21 bp, Homo Sapiens
aggcataatgtgaggaggtgg

SEQ ID NO: 2786 - DNA, 21 bp, Homo Sapiens
ggcataatgtgaggaggtggg

SEQ ID NO: 2787 - DNA, 21 bp, Homo Sapiens
ccatgtccaccatgaccctct

SEQ ID NO: 2788 - DNA, 21 bp, Homo Sapiens
tgtccaccatgaccctcttcc

SEQ ID NO: 2789 - DNA, 21 bp, Homo Sapiens
tccaccatgaccctcttccca

SEQ ID NO: 2790 - DNA, 21 bp, Homo Sapiens
atgaccctcttcccacgctga

SEQ ID NO: 2791 - DNA, 21 bp, Homo Sapiens
atcatctttcctgttccagag

SEQ ID NO: 2792 - DNA, 21 bp, Homo Sapiens
atctttcctgttccagagagg

SEQ ID NO: 2793 - DNA, 21 bp, Homo Sapiens
ctttcctgttccagagaggtg

SEQ ID NO: 2794 - DNA, 21 bp, Homo Sapiens
tttcctgttccagagaggtgg

SEQ ID NO: 2795 - DNA, 21 bp, Homo Sapiens
ttcctgttccagagaggtggg

SEQ ID NO: 2796 - DNA, 21 bp, Homo Sapiens
ggctgaggtgtctccatctct

SEQ ID NO: 2797 - DNA, 21 bp, Homo Sapiens
gctgaggtgtctccatctctg

SEQ ID NO: 2798 - DNA, 21 bp, Homo Sapiens
tctgtctcaacttcatggtgc

SEQ ID NO: 2799 - DNA, 21 bp, Homo Sapiens
ctgtctcaacttcatggtgca

SEQ ID NO: 2800 - DNA, 21 bp, Homo Sapiens
tgtctcaacttcatggtgcac

SEQ ID NO: 2801 - DNA, 21 bp, Homo Sapiens
tctcaacttcatggtgcactg

SEQ ID NO: 2802 - DNA, 21 bp, Homo Sapiens
caacttcatggtgcactgagc

SEQ ID NO: 2803 - DNA, 21 bp, Homo Sapiens
aacttcatggtgcactgagct

SEQ ID NO: 2804 - DNA, 21 bp, Homo Sapiens
acttcatggtgcactgagctg

SEQ ID NO: 2805 - DNA, 21 bp, Homo Sapiens
gagctgtaacttcttccttcc

SEQ ID NO: 2806 - DNA, 21 bp, Homo Sapiens
agctgtaacttcttccttccc

SEQ ID NO: 2807 - DNA, 21 bp, Homo Sapiens
gctgtaacttcttccttccct

SEQ ID NO: 2808 - DNA, 21 bp, Homo Sapiens
aacttcttccttccctattaa

SEQ ID NO: 2809 - DNA, 22 bp, Homo Sapiens
cccgaaggcggtgtatggattg

SEQ ID NO: 2810 - DNA, 22 bp, Homo Sapiens
ccgaaggcggtgtatggattgg

SEQ ID NO: 2811 - DNA, 22 bp, Homo Sapiens
cgaaggcggtgtatggattggg

SEQ ID NO: 2812 - DNA, 22 bp, Homo Sapiens
tttctccctctcccaacctatg

SEQ ID NO: 2813 - DNA, 22 bp, Homo Sapiens
ttctccctctcccaacctatgt

SEQ ID NO: 2814 - DNA, 22 bp, Homo Sapiens
tctccctctcccaacctatgta

SEQ ID NO: 2815 - DNA, 22 bp, Homo Sapiens
ctccctctcccaacctatgtag

SEQ ID NO: 2816 - DNA, 22 bp, Homo Sapiens
tccctctcccaacctatgtagg

SEQ ID NO: 2817 - DNA, 22 bp, Homo Sapiens
ccctctcccaacctatgtaggg

SEQ ID NO: 2818 - DNA, 22 bp, Homo Sapiens
cctctcccaacctatgtagggt

SEQ ID NO: 2819 - DNA, 22 bp, Homo Sapiens
ctctcccaacctatgtagggtc

SEQ ID NO: 2820 - DNA, 22 bp, Homo Sapiens
tctcccaacctatgtagggtcc

SEQ ID NO: 2821 - DNA, 22 bp, Homo Sapiens
ctcccaacctatgtagggtcct

SEQ ID NO: 2822 - DNA, 22 bp, Homo Sapiens
tcccaacctatgtagggtcctt

SEQ ID NO: 2823 - DNA, 22 bp, Homo Sapiens
cccaacctatgtagggtccttc

SEQ ID NO: 2824 - DNA, 22 bp, Homo Sapiens
ccaacctatgtagggtccttct

SEQ ID NO: 2825 - DNA, 22 bp, Homo Sapiens
caacctatgtagggtccttctt

SEQ ID NO: 2826 - DNA, 22 bp, Homo Sapiens
aacctatgtagggtccttcttc

SEQ ID NO: 2827 - DNA, 22 bp, Homo Sapiens
acctatgtagggtccttcttcc

SEQ ID NO: 2828 - DNA, 22 bp, Homo Sapiens
cctatgtagggtccttcttcct

SEQ ID NO: 2829 - DNA, 22 bp, Homo Sapiens
ctatgtagggtccttcttcctg

SEQ ID NO: 2830 - DNA, 22 bp, Homo Sapiens
tatgtagggtccttcttcctgg

SEQ ID NO: 2831 - DNA, 22 bp, Homo Sapiens
atgtagggtccttcttcctgga

SEQ ID NO: 2832 - DNA, 22 bp, Homo Sapiens
tgtagggtccttcttcctggat

SEQ ID NO: 2833 - DNA, 22 bp, Homo Sapiens
gtagggtccttcttcctggata

SEQ ID NO: 2834 - DNA, 22 bp, Homo Sapiens
tagggtccttcttcctggatac

SEQ ID NO: 2835 - DNA, 22 bp, Homo Sapiens
agggtccttcttcctggatact

SEQ ID NO: 2836 - DNA, 22 bp, Homo Sapiens
gggtccttcttcctggatactc

SEQ ID NO: 2837 - DNA, 22 bp, Homo Sapiens
ggtccttcttcctggatactca

SEQ ID NO: 2838 - DNA, 22 bp, Homo Sapiens
gtccttcttcctggatactcac

SEQ ID NO: 2839 - DNA, 22 bp, Homo Sapiens
tccttcttcctggatactcacg

SEQ ID NO: 2840 - DNA, 22 bp, Homo Sapiens
ccttcttcctggatactcacga

SEQ ID NO: 2841 - DNA, 22 bp, Homo Sapiens
cttcttcctggatactcacgac

SEQ ID NO: 2842 - DNA, 22 bp, Homo Sapiens
ttcttcctggatactcacgacg

SEQ ID NO: 2843 - DNA, 22 bp, Homo Sapiens
tcttcctggatactcacgacgc

SEQ ID NO: 2844 - DNA, 22 bp, Homo Sapiens
cttcctggatactcacgacgcg

SEQ ID NO: 2845 - DNA, 22 bp, Homo Sapiens
ttcctggatactcacgacgcgg

SEQ ID NO: 2846 - DNA, 22 bp, Homo Sapiens
tcctggatactcacgacgcgga

SEQ ID NO: 2847 - DNA, 22 bp, Homo Sapiens
atactcacgacgcggacccagt

SEQ ID NO: 2848 - DNA, 22 bp, Homo Sapiens
tactcacgacgcggacccagtt

SEQ ID NO: 2849 - DNA, 22 bp, Homo Sapiens
cggacccagttctcactcccat

SEQ ID NO: 2850 - DNA, 22 bp, Homo Sapiens
ggacccagttctcactcccatt

SEQ ID NO: 2851 - DNA, 22 bp, Homo Sapiens
gacccagttctcactcccattg

SEQ ID NO: 2852 - DNA, 22 bp, Homo Sapiens
acccagttctcactcccattgg

SEQ ID NO: 2853 - DNA, 22 bp, Homo Sapiens
cccagttctcactcccattggg

SEQ ID NO: 2854 - DNA, 22 bp, Homo Sapiens
ccagttctcactcccattgggt

SEQ ID NO: 2855 - DNA, 22 bp, Homo Sapiens
cagttctcactcccattgggtg

SEQ ID NO: 2856 - DNA, 22 bp, Homo Sapiens
agttctcactcccattgggtgt

SEQ ID NO: 2857 - DNA, 22 bp, Homo Sapiens
gttctcactcccattgggtgtc

SEQ ID NO: 2858 - DNA, 22 bp, Homo Sapiens
ttctcactcccattgggtgtcg

SEQ ID NO: 2859 - DNA, 22 bp, Homo Sapiens
tctcactcccattgggtgtcgg

SEQ ID NO: 2860 - DNA, 22 bp, Homo Sapiens
tcactcccattgggtgtcgggt

SEQ ID NO: 2861 - DNA, 22 bp, Homo Sapiens
cactcccattgggtgtcgggtt

SEQ ID NO: 2862 - DNA, 22 bp, Homo Sapiens
actcccattgggtgtcgggttt

SEQ ID NO: 2863 - DNA, 22 bp, Homo Sapiens
ctcccattgggtgtcgggtttc

SEQ ID NO: 2864 - DNA, 22 bp, Homo Sapiens
tcccattgggtgtcgggtttcc

SEQ ID NO: 2865 - DNA, 22 bp, Homo Sapiens
cccattgggtgtcgggtttcca

SEQ ID NO: 2866 - DNA, 22 bp, Homo Sapiens
ccattgggtgtcgggtttccag

SEQ ID NO: 2867 - DNA, 22 bp, Homo Sapiens
cattgggtgtcgggtttccaga

SEQ ID NO: 2868 - DNA, 22 bp, Homo Sapiens
attgggtgtcgggtttccagag

SEQ ID NO: 2869 - DNA, 22 bp, Homo Sapiens
ttgggtgtcgggtttccagaga

SEQ ID NO: 2870 - DNA, 22 bp, Homo Sapiens
tgggtgtcgggtttccagagaa

SEQ ID NO: 2871 - DNA, 22 bp, Homo Sapiens
gggtgtcgggtttccagagaag

SEQ ID NO: 2872 - DNA, 22 bp, Homo Sapiens
ggtgtcgggtttccagagaagc

SEQ ID NO: 2873 - DNA, 22 bp, Homo Sapiens
gtgtcgggtttccagagaagcc

SEQ ID NO: 2874 - DNA, 22 bp, Homo Sapiens
tgtcgggtttccagagaagcca

SEQ ID NO: 2875 - DNA, 22 bp, Homo Sapiens
gtcgggtttccagagaagccaa

SEQ ID NO: 2876 - DNA, 22 bp, Homo Sapiens
tcgggtttccagagaagccaat

SEQ ID NO: 2877 - DNA, 22 bp, Homo Sapiens
cgggtttccagagaagccaatc

SEQ ID NO: 2878 - DNA, 22 bp, Homo Sapiens
gggtttccagagaagccaatca

SEQ ID NO: 2879 - DNA, 22 bp, Homo Sapiens
ggtttccagagaagccaatcag

SEQ ID NO: 2880 - DNA, 22 bp, Homo Sapiens
gtttccagagaagccaatcagt

SEQ ID NO: 2881 - DNA, 22 bp, Homo Sapiens
tttccagagaagccaatcagtg

SEQ ID NO: 2882 - DNA, 22 bp, Homo Sapiens
ttccagagaagccaatcagtgt

SEQ ID NO: 2883 - DNA, 22 bp, Homo Sapiens
tccagagaagccaatcagtgtc

SEQ ID NO: 2884 - DNA, 22 bp, Homo Sapiens
ccagagaagccaatcagtgtcg

SEQ ID NO: 2885 - DNA, 22 bp, Homo Sapiens
cagagaagccaatcagtgtcgt

SEQ ID NO: 2886 - DNA, 22 bp, Homo Sapiens
agagaagccaatcagtgtcgtc

SEQ ID NO: 2887 - DNA, 22 bp, Homo Sapiens
gagaagccaatcagtgtcgtcg

SEQ ID NO: 2888 - DNA, 22 bp, Homo Sapiens
agaagccaatcagtgtcgtcgc

SEQ ID NO: 2889 - DNA, 22 bp, Homo Sapiens
gaagccaatcagtgtcgtcgcg

SEQ ID NO: 2890 - DNA, 22 bp, Homo Sapiens
aagccaatcagtgtcgtcgcgg

SEQ ID NO: 2891 - DNA, 22 bp, Homo Sapiens
agccaatcagtgtcgtcgcggt

SEQ ID NO: 2892 - DNA, 22 bp, Homo Sapiens
tcgtcgcggtcgcggttctaaa

SEQ ID NO: 2893 - DNA, 22 bp, Homo Sapiens
gtcgcggtcgcggttctaaagt

SEQ ID NO: 2894 - DNA, 22 bp, Homo Sapiens
tcgcggtcgcggttctaaagtc

SEQ ID NO: 2895 - DNA, 22 bp, Homo Sapiens
ggtcgcggttctaaagtccgca

SEQ ID NO: 2896 - DNA, 22 bp, Homo Sapiens
gtcgcggttctaaagtccgcac

SEQ ID NO: 2897 - DNA, 22 bp, Homo Sapiens
tcgcggttctaaagtccgcacg

SEQ ID NO: 2898 - DNA, 22 bp, Homo Sapiens
gcggttctaaagtccgcacgca

SEQ ID NO: 2899 - DNA, 22 bp, Homo Sapiens
cggttctaaagtccgcacgcac

SEQ ID NO: 2900 - DNA, 22 bp, Homo Sapiens
ggttctaaagtccgcacgcacc

SEQ ID NO: 2901 - DNA, 22 bp, Homo Sapiens
gttctaaagtccgcacgcaccc

SEQ ID NO: 2902 - DNA, 22 bp, Homo Sapiens
ttctaaagtccgcacgcaccca

SEQ ID NO: 2903 - DNA, 22 bp, Homo Sapiens
tctaaagtccgcacgcacccac

SEQ ID NO: 2904 - DNA, 22 bp, Homo Sapiens
cacccaccgggactcagattct

SEQ ID NO: 2905 - DNA, 22 bp, Homo Sapiens
acccaccgggactcagattctc

SEQ ID NO: 2906 - DNA, 22 bp, Homo Sapiens
cgaaccctcgtcctgctactct

SEQ ID NO: 2907 - DNA, 22 bp, Homo Sapiens
gaaccctcgtcctgctactctc

SEQ ID NO: 2908 - DNA, 22 bp, Homo Sapiens
aaccctcgtcctgctactctcg

SEQ ID NO: 2909 - DNA, 22 bp, Homo Sapiens
cgggctctcactccatgaggta

SEQ ID NO: 2910 - DNA, 22 bp, Homo Sapiens
gggctctcactccatgaggtat

SEQ ID NO: 2911 - DNA, 22 bp, Homo Sapiens
ggctctcactccatgaggtatt

SEQ ID NO: 2912 - DNA, 22 bp, Homo Sapiens
gctctcactccatgaggtattt

SEQ ID NO: 2913 - DNA, 22 bp, Homo Sapiens
ctctcactccatgaggtatttc

SEQ ID NO: 2914 - DNA, 22 bp, Homo Sapiens
tctcactccatgaggtatttct

SEQ ID NO: 2915 - DNA, 22 bp, Homo Sapiens
ctcactccatgaggtatttctt

SEQ ID NO: 2916 - DNA, 22 bp, Homo Sapiens
tcactccatgaggtatttcttc

SEQ ID NO: 2917 - DNA, 22 bp, Homo Sapiens
cactccatgaggtatttcttca

SEQ ID NO: 2918 - DNA, 22 bp, Homo Sapiens
actccatgaggtatttcttcac

SEQ ID NO: 2919 - DNA, 22 bp, Homo Sapiens
ctccatgaggtatttcttcaca

SEQ ID NO: 2920 - DNA, 22 bp, Homo Sapiens
tccatgaggtatttcttcacat

SEQ ID NO: 2921 - DNA, 22 bp, Homo Sapiens
ccatgaggtatttcttcacatc

SEQ ID NO: 2922 - DNA, 22 bp, Homo Sapiens
catgaggtatttcttcacatcc

SEQ ID NO: 2923 - DNA, 22 bp, Homo Sapiens
atgaggtatttcttcacatccg

SEQ ID NO: 2924 - DNA, 22 bp, Homo Sapiens
tgaggtatttcttcacatccgt

SEQ ID NO: 2925 - DNA, 22 bp, Homo Sapiens
gaggtatttcttcacatccgtg

SEQ ID NO: 2926 - DNA, 22 bp, Homo Sapiens
aggtatttcttcacatccgtgt

SEQ ID NO: 2927 - DNA, 22 bp, Homo Sapiens
ggtatttcttcacatccgtgtc

SEQ ID NO: 2928 - DNA, 22 bp, Homo Sapiens
gtatttcttcacatccgtgtcc

SEQ ID NO: 2929 - DNA, 22 bp, Homo Sapiens
tatttcttcacatccgtgtccc

SEQ ID NO: 2930 - DNA, 22 bp, Homo Sapiens
atttcttcacatccgtgtcccg

SEQ ID NO: 2931 - DNA, 22 bp, Homo Sapiens
tttcttcacatccgtgtcccgg

SEQ ID NO: 2932 - DNA, 22 bp, Homo Sapiens
ttcttcacatccgtgtcccggc

SEQ ID NO: 2933 - DNA, 22 bp, Homo Sapiens
gcttcatcgcagtgggctacgt

SEQ ID NO: 2934 - DNA, 22 bp, Homo Sapiens
cttcatcgcagtgggctacgtg

SEQ ID NO: 2935 - DNA, 22 bp, Homo Sapiens
ttcatcgcagtgggctacgtgg

SEQ ID NO: 2936 - DNA, 22 bp, Homo Sapiens
tcatcgcagtgggctacgtgga

SEQ ID NO: 2937 - DNA, 22 bp, Homo Sapiens
gctacgtggacgacacgcagtt

SEQ ID NO: 2938 - DNA, 22 bp, Homo Sapiens
ctacgtggacgacacgcagttc

SEQ ID NO: 2939 - DNA, 22 bp, Homo Sapiens
tacgtggacgacacgcagttcg

SEQ ID NO: 2940 - DNA, 22 bp, Homo Sapiens
acgtggacgacacgcagttcgt

SEQ ID NO: 2941 - DNA, 22 bp, Homo Sapiens
acgacacgcagttcgtgcggtt

SEQ ID NO: 2942 - DNA, 22 bp, Homo Sapiens
acacgcagttcgtgcggttcga

SEQ ID NO: 2943 - DNA, 22 bp, Homo Sapiens
acgcagttcgtgcggttcgaca

SEQ ID NO: 2944 - DNA, 22 bp, Homo Sapiens
agttcgtgcggttcgacagcga

SEQ ID NO: 2945 - DNA, 22 bp, Homo Sapiens
atagagcaggagggtccggagt

SEQ ID NO: 2946 - DNA, 22 bp, Homo Sapiens
tagagcaggagggtccggagta

SEQ ID NO: 2947 - DNA, 22 bp, Homo Sapiens
agagcaggagggtccggagtat

SEQ ID NO: 2948 - DNA, 22 bp, Homo Sapiens
gagcaggagggtccggagtatt

SEQ ID NO: 2949 - DNA, 22 bp, Homo Sapiens
agcaggagggtccggagtattg

SEQ ID NO: 2950 - DNA, 22 bp, Homo Sapiens
aggagggtccggagtattggga

SEQ ID NO: 2951 - DNA, 22 bp, Homo Sapiens
gggagacacggaaagtgaaggc

SEQ ID NO: 2952 - DNA, 22 bp, Homo Sapiens
ggagacacggaaagtgaaggcc

SEQ ID NO: 2953 - DNA, 22 bp, Homo Sapiens
gagacacggaaagtgaaggccc

SEQ ID NO: 2954 - DNA, 22 bp, Homo Sapiens
agacacggaaagtgaaggccca

SEQ ID NO: 2955 - DNA, 22 bp, Homo Sapiens
gacacggaaagtgaaggcccac

SEQ ID NO: 2956 - DNA, 22 bp, Homo Sapiens
acacggaaagtgaaggcccact

SEQ ID NO: 2957 - DNA, 22 bp, Homo Sapiens
cacggaaagtgaaggcccactc

SEQ ID NO: 2958 - DNA, 22 bp, Homo Sapiens
acggaaagtgaaggcccactca

SEQ ID NO: 2959 - DNA, 22 bp, Homo Sapiens
cggaaagtgaaggcccactcac

SEQ ID NO: 2960 - DNA, 22 bp, Homo Sapiens
ggaaagtgaaggcccactcaca

SEQ ID NO: 2961 - DNA, 22 bp, Homo Sapiens
gaaagtgaaggcccactcacag

SEQ ID NO: 2962 - DNA, 22 bp, Homo Sapiens
aaagtgaaggcccactcacaga

SEQ ID NO: 2963 - DNA, 22 bp, Homo Sapiens
aagtgaaggcccactcacagac

SEQ ID NO: 2964 - DNA, 22 bp, Homo Sapiens
agtgaaggcccactcacagact

SEQ ID NO: 2965 - DNA, 22 bp, Homo Sapiens
gtgaaggcccactcacagactc

SEQ ID NO: 2966 - DNA, 22 bp, Homo Sapiens
tgaaggcccactcacagactca

SEQ ID NO: 2967 - DNA, 22 bp, Homo Sapiens
gaaggcccactcacagactcac

SEQ ID NO: 2968 - DNA, 22 bp, Homo Sapiens
aaggcccactcacagactcacc

SEQ ID NO: 2969 - DNA, 22 bp, Homo Sapiens
cccactcacagactcaccgagt

SEQ ID NO: 2970 - DNA, 22 bp, Homo Sapiens
ccactcacagactcaccgagtg

SEQ ID NO: 2971 - DNA, 22 bp, Homo Sapiens
cactcacagactcaccgagtgg

SEQ ID NO: 2972 - DNA, 22 bp, Homo Sapiens
actcacagactcaccgagtgga

SEQ ID NO: 2973 - DNA, 22 bp, Homo Sapiens
ctcacagactcaccgagtggac

SEQ ID NO: 2974 - DNA, 22 bp, Homo Sapiens
tcacagactcaccgagtggacc

SEQ ID NO: 2975 - DNA, 22 bp, Homo Sapiens
cacagactcaccgagtggacct

SEQ ID NO: 2976 - DNA, 22 bp, Homo Sapiens
acagactcaccgagtggacctg

SEQ ID NO: 2977 - DNA, 22 bp, Homo Sapiens
gcggctactacaaccagagcga

SEQ ID NO: 2978 - DNA, 22 bp, Homo Sapiens
cggctactacaaccagagcgag

SEQ ID NO: 2979 - DNA, 22 bp, Homo Sapiens
ggctactacaaccagagcgagg

SEQ ID NO: 2980 - DNA, 22 bp, Homo Sapiens
gctactacaaccagagcgaggc

SEQ ID NO: 2981 - DNA, 22 bp, Homo Sapiens
ctactacaaccagagcgaggcc

SEQ ID NO: 2982 - DNA, 22 bp, Homo Sapiens
tactacaaccagagcgaggccg

SEQ ID NO: 2983 - DNA, 22 bp, Homo Sapiens
tacaaccagagcgaggccggtt

SEQ ID NO: 2984 - DNA, 22 bp, Homo Sapiens
ggttctcacaccgtccagagga

SEQ ID NO: 2985 - DNA, 22 bp, Homo Sapiens
gttctcacaccgtccagaggat

SEQ ID NO: 2986 - DNA, 22 bp, Homo Sapiens
ttctcacaccgtccagaggatg

SEQ ID NO: 2987 - DNA, 22 bp, Homo Sapiens
tctcacaccgtccagaggatgt

SEQ ID NO: 2988 - DNA, 22 bp, Homo Sapiens
ctcacaccgtccagaggatgta

SEQ ID NO: 2989 - DNA, 22 bp, Homo Sapiens
tcacaccgtccagaggatgtat

SEQ ID NO: 2990 - DNA, 22 bp, Homo Sapiens
cacaccgtccagaggatgtatg

SEQ ID NO: 2991 - DNA, 22 bp, Homo Sapiens
acaccgtccagaggatgtatgg

SEQ ID NO: 2992 - DNA, 22 bp, Homo Sapiens
caccgtccagaggatgtatggc

SEQ ID NO: 2993 - DNA, 22 bp, Homo Sapiens
accgtccagaggatgtatggct

SEQ ID NO: 2994 - DNA, 22 bp, Homo Sapiens
ccgtccagaggatgtatggctg

SEQ ID NO: 2995 - DNA, 22 bp, Homo Sapiens
cgtccagaggatgtatggctgc

SEQ ID NO: 2996 - DNA, 22 bp, Homo Sapiens
gtccagaggatgtatggctgcg

SEQ ID NO: 2997 - DNA, 22 bp, Homo Sapiens
tccagaggatgtatggctgcga

SEQ ID NO: 2998 - DNA, 22 bp, Homo Sapiens
ccagaggatgtatggctgcgac

SEQ ID NO: 2999 - DNA, 22 bp, Homo Sapiens
cagaggatgtatggctgcgacg

SEQ ID NO: 3000 - DNA, 22 bp, Homo Sapiens
agaggatgtatggctgcgacgt

SEQ ID NO: 3001 - DNA, 22 bp, Homo Sapiens
gaggatgtatggctgcgacgtg

SEQ ID NO: 3002 - DNA, 22 bp, Homo Sapiens
aggatgtatggctgcgacgtgg

SEQ ID NO: 3003 - DNA, 22 bp, Homo Sapiens
ggtaccaccagtacgcctacga

SEQ ID NO: 3004 - DNA, 22 bp, Homo Sapiens
gtaccaccagtacgcctacgac

SEQ ID NO: 3005 - DNA, 22 bp, Homo Sapiens
taccaccagtacgcctacgacg

SEQ ID NO: 3006 - DNA, 22 bp, Homo Sapiens
accagtacgcctacgacggcaa

SEQ ID NO: 3007 - DNA, 22 bp, Homo Sapiens
agtacgcctacgacggcaagga

SEQ ID NO: 3008 - DNA, 22 bp, Homo Sapiens
gtacgcctacgacggcaaggat

SEQ ID NO: 3009 - DNA, 22 bp, Homo Sapiens
tacgcctacgacggcaaggatt

SEQ ID NO: 3010 - DNA, 22 bp, Homo Sapiens
acgcctacgacggcaaggatta

SEQ ID NO: 3011 - DNA, 22 bp, Homo Sapiens
cgcctacgacggcaaggattac

SEQ ID NO: 3012 - DNA, 22 bp, Homo Sapiens
gcctacgacggcaaggattaca

SEQ ID NO: 3013 - DNA, 22 bp, Homo Sapiens
cctacgacggcaaggattacat

SEQ ID NO: 3014 - DNA, 22 bp, Homo Sapiens
ctacgacggcaaggattacatc

SEQ ID NO: 3015 - DNA, 22 bp, Homo Sapiens
tacgacggcaaggattacatcg

SEQ ID NO: 3016 - DNA, 22 bp, Homo Sapiens
acgacggcaaggattacatcgc

SEQ ID NO: 3017 - DNA, 22 bp, Homo Sapiens
cgacggcaaggattacatcgcc

SEQ ID NO: 3018 - DNA, 22 bp, Homo Sapiens
gacggcaaggattacatcgccc

SEQ ID NO: 3019 - DNA, 22 bp, Homo Sapiens
acggcaaggattacatcgccct

SEQ ID NO: 3020 - DNA, 22 bp, Homo Sapiens
cggcaaggattacatcgccctg

SEQ ID NO: 3021 - DNA, 22 bp, Homo Sapiens
ggcaaggattacatcgccctga

SEQ ID NO: 3022 - DNA, 22 bp, Homo Sapiens
gcaaggattacatcgccctgaa

SEQ ID NO: 3023 - DNA, 22 bp, Homo Sapiens
caaggattacatcgccctgaaa

SEQ ID NO: 3024 - DNA, 22 bp, Homo Sapiens
aaggattacatcgccctgaaag

SEQ ID NO: 3025 - DNA, 22 bp, Homo Sapiens
aggattacatcgccctgaaaga

SEQ ID NO: 3026 - DNA, 22 bp, Homo Sapiens
ggattacatcgccctgaaagag

SEQ ID NO: 3027 - DNA, 22 bp, Homo Sapiens
gattacatcgccctgaaagagg

SEQ ID NO: 3028 - DNA, 22 bp, Homo Sapiens
attacatcgccctgaaagagga

SEQ ID NO: 3029 - DNA, 22 bp, Homo Sapiens
ttacatcgccctgaaagaggac

SEQ ID NO: 3030 - DNA, 22 bp, Homo Sapiens
tacatcgccctgaaagaggacc

SEQ ID NO: 3031 - DNA, 22 bp, Homo Sapiens
acatcgccctgaaagaggacct

SEQ ID NO: 3032 - DNA, 22 bp, Homo Sapiens
catcgccctgaaagaggacctg

SEQ ID NO: 3033 - DNA, 22 bp, Homo Sapiens
atcgccctgaaagaggacctgc

SEQ ID NO: 3034 - DNA, 22 bp, Homo Sapiens
cctgaaagaggacctgcgctct

SEQ ID NO: 3035 - DNA, 22 bp, Homo Sapiens
ctgaaagaggacctgcgctctt

SEQ ID NO: 3036 - DNA, 22 bp, Homo Sapiens
tgaaagaggacctgcgctcttg

SEQ ID NO: 3037 - DNA, 22 bp, Homo Sapiens
gaaagaggacctgcgctcttgg

SEQ ID NO: 3038 - DNA, 22 bp, Homo Sapiens
aaagaggacctgcgctcttgga

SEQ ID NO: 3039 - DNA, 22 bp, Homo Sapiens
aagaggacctgcgctcttggac

SEQ ID NO: 3040 - DNA, 22 bp, Homo Sapiens
gacatggcagctcagaccacca

SEQ ID NO: 3041 - DNA, 22 bp, Homo Sapiens
acatggcagctcagaccaccaa

SEQ ID NO: 3042 - DNA, 22 bp, Homo Sapiens
catggcagctcagaccaccaag

SEQ ID NO: 3043 - DNA, 22 bp, Homo Sapiens
atggcagctcagaccaccaagc

SEQ ID NO: 3044 - DNA, 22 bp, Homo Sapiens
tggcagctcagaccaccaagca

SEQ ID NO: 3045 - DNA, 22 bp, Homo Sapiens
gcagctcagaccaccaagcaca

SEQ ID NO: 3046 - DNA, 22 bp, Homo Sapiens
cagctcagaccaccaagcacaa

SEQ ID NO: 3047 - DNA, 22 bp, Homo Sapiens
agctcagaccaccaagcacaag

SEQ ID NO: 3048 - DNA, 22 bp, Homo Sapiens
gctcagaccaccaagcacaagt

SEQ ID NO: 3049 - DNA, 22 bp, Homo Sapiens
ctcagaccaccaagcacaagtg

SEQ ID NO: 3050 - DNA, 22 bp, Homo Sapiens
tcagaccaccaagcacaagtgg

SEQ ID NO: 3051 - DNA, 22 bp, Homo Sapiens
cagaccaccaagcacaagtggg

SEQ ID NO: 3052 - DNA, 22 bp, Homo Sapiens
agaccaccaagcacaagtggga

SEQ ID NO: 3053 - DNA, 22 bp, Homo Sapiens
gaccaccaagcacaagtgggag

SEQ ID NO: 3054 - DNA, 22 bp, Homo Sapiens
accaccaagcacaagtgggagg

SEQ ID NO: 3055 - DNA, 22 bp, Homo Sapiens
ccatgtggcggagcagttgaga

SEQ ID NO: 3056 - DNA, 22 bp, Homo Sapiens
catgtggcggagcagttgagag

SEQ ID NO: 3057 - DNA, 22 bp, Homo Sapiens
atgtggcggagcagttgagagc

SEQ ID NO: 3058 - DNA, 22 bp, Homo Sapiens
tggcggagcagttgagagccta

SEQ ID NO: 3059 - DNA, 22 bp, Homo Sapiens
cggagcagttgagagcctacct

SEQ ID NO: 3060 - DNA, 22 bp, Homo Sapiens
ggagcagttgagagcctacctg

SEQ ID NO: 3061 - DNA, 22 bp, Homo Sapiens
gagcagttgagagcctacctgg

SEQ ID NO: 3062 - DNA, 22 bp, Homo Sapiens
agcagttgagagcctacctgga

SEQ ID NO: 3063 - DNA, 22 bp, Homo Sapiens
gcagttgagagcctacctggag

SEQ ID NO: 3064 - DNA, 22 bp, Homo Sapiens
cagttgagagcctacctggagg

SEQ ID NO: 3065 - DNA, 22 bp, Homo Sapiens
agttgagagcctacctggaggg

SEQ ID NO: 3066 - DNA, 22 bp, Homo Sapiens
ttgagagcctacctggagggca

SEQ ID NO: 3067 - DNA, 22 bp, Homo Sapiens
tggagtggctccgcagatacct

SEQ ID NO: 3068 - DNA, 22 bp, Homo Sapiens
agtggctccgcagatacctgga

SEQ ID NO: 3069 - DNA, 22 bp, Homo Sapiens
tggctccgcagatacctggaga

SEQ ID NO: 3070 - DNA, 22 bp, Homo Sapiens
ggctccgcagatacctggagaa

SEQ ID NO: 3071 - DNA, 22 bp, Homo Sapiens
gctccgcagatacctggagaac

SEQ ID NO: 3072 - DNA, 22 bp, Homo Sapiens
ctccgcagatacctggagaacg

SEQ ID NO: 3073 - DNA, 22 bp, Homo Sapiens
tccgcagatacctggagaacgg

SEQ ID NO: 3074 - DNA, 22 bp, Homo Sapiens
cgcagatacctggagaacggga

SEQ ID NO: 3075 - DNA, 22 bp, Homo Sapiens
gcagatacctggagaacgggaa

SEQ ID NO: 3076 - DNA, 22 bp, Homo Sapiens
cagatacctggagaacgggaag

SEQ ID NO: 3077 - DNA, 22 bp, Homo Sapiens
agatacctggagaacgggaagg

SEQ ID NO: 3078 - DNA, 22 bp, Homo Sapiens
gatacctggagaacgggaagga

SEQ ID NO: 3079 - DNA, 22 bp, Homo Sapiens
atacctggagaacgggaaggag

SEQ ID NO: 3080 - DNA, 22 bp, Homo Sapiens
tacctggagaacgggaaggaga

SEQ ID NO: 3081 - DNA, 22 bp, Homo Sapiens
acctggagaacgggaaggagac

SEQ ID NO: 3082 - DNA, 22 bp, Homo Sapiens
tggagaacgggaaggagacgct

SEQ ID NO: 3083 - DNA, 22 bp, Homo Sapiens
agaacgggaaggagacgctgca

SEQ ID NO: 3084 - DNA, 22 bp, Homo Sapiens
aaacgcatatgactcaccacgc

SEQ ID NO: 3085 - DNA, 22 bp, Homo Sapiens
aacgcatatgactcaccacgct

SEQ ID NO: 3086 - DNA, 22 bp, Homo Sapiens
acgcatatgactcaccacgctg

SEQ ID NO: 3087 - DNA, 22 bp, Homo Sapiens
cgcatatgactcaccacgctgt

SEQ ID NO: 3088 - DNA, 22 bp, Homo Sapiens
gcatatgactcaccacgctgtc

SEQ ID NO: 3089 - DNA, 22 bp, Homo Sapiens
catatgactcaccacgctgtct

SEQ ID NO: 3090 - DNA, 22 bp, Homo Sapiens
atatgactcaccacgctgtctc

SEQ ID NO: 3091 - DNA, 22 bp, Homo Sapiens
tatgactcaccacgctgtctct

SEQ ID NO: 3092 - DNA, 22 bp, Homo Sapiens
atgactcaccacgctgtctctg

SEQ ID NO: 3093 - DNA, 22 bp, Homo Sapiens
tgactcaccacgctgtctctga

SEQ ID NO: 3094 - DNA, 22 bp, Homo Sapiens
gactcaccacgctgtctctgac

SEQ ID NO: 3095 - DNA, 22 bp, Homo Sapiens
actcaccacgctgtctctgacc

SEQ ID NO: 3096 - DNA, 22 bp, Homo Sapiens
ctcaccacgctgtctctgacca

SEQ ID NO: 3097 - DNA, 22 bp, Homo Sapiens
tcaccacgctgtctctgaccat

SEQ ID NO: 3098 - DNA, 22 bp, Homo Sapiens
caccacgctgtctctgaccatg

SEQ ID NO: 3099 - DNA, 22 bp, Homo Sapiens
accacgctgtctctgaccatga

SEQ ID NO: 3100 - DNA, 22 bp, Homo Sapiens
ccacgctgtctctgaccatgaa

SEQ ID NO: 3101 - DNA, 22 bp, Homo Sapiens
cacgctgtctctgaccatgaag

SEQ ID NO: 3102 - DNA, 22 bp, Homo Sapiens
acgctgtctctgaccatgaagc

SEQ ID NO: 3103 - DNA, 22 bp, Homo Sapiens
cgctgtctctgaccatgaagcc

SEQ ID NO: 3104 - DNA, 22 bp, Homo Sapiens
gctgtctctgaccatgaagcca

SEQ ID NO: 3105 - DNA, 22 bp, Homo Sapiens
ctgtctctgaccatgaagccac

SEQ ID NO: 3106 - DNA, 22 bp, Homo Sapiens
tgtctctgaccatgaagccacc

SEQ ID NO: 3107 - DNA, 22 bp, Homo Sapiens
gtctctgaccatgaagccaccc

SEQ ID NO: 3108 - DNA, 22 bp, Homo Sapiens
tctctgaccatgaagccaccct

SEQ ID NO: 3109 - DNA, 22 bp, Homo Sapiens
ctctgaccatgaagccaccctg

SEQ ID NO: 3110 - DNA, 22 bp, Homo Sapiens
tctgaccatgaagccaccctga

SEQ ID NO: 3111 - DNA, 22 bp, Homo Sapiens
ctgaccatgaagccaccctgag

SEQ ID NO: 3112 - DNA, 22 bp, Homo Sapiens
tgaccatgaagccaccctgagg

SEQ ID NO: 3113 - DNA, 22 bp, Homo Sapiens
gaccatgaagccaccctgaggt

SEQ ID NO: 3114 - DNA, 22 bp, Homo Sapiens
accatgaagccaccctgaggtg

SEQ ID NO: 3115 - DNA, 22 bp, Homo Sapiens
catgaagccaccctgaggtgct

SEQ ID NO: 3116 - DNA, 22 bp, Homo Sapiens
atgaagccaccctgaggtgctg

SEQ ID NO: 3117 - DNA, 22 bp, Homo Sapiens
ctgagcttctaccctgcggaga

SEQ ID NO: 3118 - DNA, 22 bp, Homo Sapiens
tgagcttctaccctgcggagat

SEQ ID NO: 3119 - DNA, 22 bp, Homo Sapiens
gagcttctaccctgcggagatc

SEQ ID NO: 3120 - DNA, 22 bp, Homo Sapiens
agcttctaccctgcggagatca

SEQ ID NO: 3121 - DNA, 22 bp, Homo Sapiens
gcttctaccctgcggagatcac

SEQ ID NO: 3122 - DNA, 22 bp, Homo Sapiens
cttctaccctgcggagatcaca

SEQ ID NO: 3123 - DNA, 22 bp, Homo Sapiens
ttctaccctgcggagatcacac

SEQ ID NO: 3124 - DNA, 22 bp, Homo Sapiens
tctaccctgcggagatcacact

SEQ ID NO: 3125 - DNA, 22 bp, Homo Sapiens
ctaccctgcggagatcacactg

SEQ ID NO: 3126 - DNA, 22 bp, Homo Sapiens
taccctgcggagatcacactga

SEQ ID NO: 3127 - DNA, 22 bp, Homo Sapiens
accctgcggagatcacactgac

SEQ ID NO: 3128 - DNA, 22 bp, Homo Sapiens
cctgcggagatcacactgacct

SEQ ID NO: 3129 - DNA, 22 bp, Homo Sapiens
ctgcggagatcacactgacctg

SEQ ID NO: 3130 - DNA, 22 bp, Homo Sapiens
tgcggagatcacactgacctgg

SEQ ID NO: 3131 - DNA, 22 bp, Homo Sapiens
cggagatcacactgacctggca

SEQ ID NO: 3132 - DNA, 22 bp, Homo Sapiens
ggagatcacactgacctggcag

SEQ ID NO: 3133 - DNA, 22 bp, Homo Sapiens
gagatcacactgacctggcagc

SEQ ID NO: 3134 - DNA, 22 bp, Homo Sapiens
agatcacactgacctggcagcg

SEQ ID NO: 3135 - DNA, 22 bp, Homo Sapiens
gggatggaaccttccagaagtg

SEQ ID NO: 3136 - DNA, 22 bp, Homo Sapiens
ggatggaaccttccagaagtgg

SEQ ID NO: 3137 - DNA, 22 bp, Homo Sapiens
gatggaaccttccagaagtggg

SEQ ID NO: 3138 - DNA, 22 bp, Homo Sapiens
atggaaccttccagaagtgggc

SEQ ID NO: 3139 - DNA, 22 bp, Homo Sapiens
tggaaccttccagaagtgggcg

SEQ ID NO: 3140 - DNA, 22 bp, Homo Sapiens
ctgtggtggtgccttctggaca

SEQ ID NO: 3141 - DNA, 22 bp, Homo Sapiens
tgtggtggtgccttctggacag

SEQ ID NO: 3142 - DNA, 22 bp, Homo Sapiens
tggtggtgccttctggacagga

SEQ ID NO: 3143 - DNA, 22 bp, Homo Sapiens
tggtgccttctggacaggagca

SEQ ID NO: 3144 - DNA, 22 bp, Homo Sapiens
gtgccttctggacaggagcaga

SEQ ID NO: 3145 - DNA, 22 bp, Homo Sapiens
tgccttctggacaggagcagag

SEQ ID NO: 3146 - DNA, 22 bp, Homo Sapiens
gccttctggacaggagcagaga

SEQ ID NO: 3147 - DNA, 22 bp, Homo Sapiens
ccttctggacaggagcagagat

SEQ ID NO: 3148 - DNA, 22 bp, Homo Sapiens
cttctggacaggagcagagata

SEQ ID NO: 3149 - DNA, 22 bp, Homo Sapiens
ttctggacaggagcagagatac

SEQ ID NO: 3150 - DNA, 22 bp, Homo Sapiens
tctggacaggagcagagataca

SEQ ID NO: 3151 - DNA, 22 bp, Homo Sapiens
ctggacaggagcagagatacac

SEQ ID NO: 3152 - DNA, 22 bp, Homo Sapiens
tggacaggagcagagatacacc

SEQ ID NO: 3153 - DNA, 22 bp, Homo Sapiens
ggacaggagcagagatacacct

SEQ ID NO: 3154 - DNA, 22 bp, Homo Sapiens
gacaggagcagagatacacctg

SEQ ID NO: 3155 - DNA, 22 bp, Homo Sapiens
acaggagcagagatacacctgc

SEQ ID NO: 3156 - DNA, 22 bp, Homo Sapiens
caggagcagagatacacctgcc

SEQ ID NO: 3157 - DNA, 22 bp, Homo Sapiens
aggagcagagatacacctgcca

SEQ ID NO: 3158 - DNA, 22 bp, Homo Sapiens
ggagcagagatacacctgccat

SEQ ID NO: 3159 - DNA, 22 bp, Homo Sapiens
gagcagagatacacctgccatg

SEQ ID NO: 3160 - DNA, 22 bp, Homo Sapiens
agcagagatacacctgccatgt

SEQ ID NO: 3161 - DNA, 22 bp, Homo Sapiens
gcagagatacacctgccatgtg

SEQ ID NO: 3162 - DNA, 22 bp, Homo Sapiens
cagagatacacctgccatgtgc

SEQ ID NO: 3163 - DNA, 22 bp, Homo Sapiens
agagatacacctgccatgtgca

SEQ ID NO: 3164 - DNA, 22 bp, Homo Sapiens
gagatacacctgccatgtgcag

SEQ ID NO: 3165 - DNA, 22 bp, Homo Sapiens
agatacacctgccatgtgcagc

SEQ ID NO: 3166 - DNA, 22 bp, Homo Sapiens
gatacacctgccatgtgcagca

SEQ ID NO: 3167 - DNA, 22 bp, Homo Sapiens
atacacctgccatgtgcagcat

SEQ ID NO: 3168 - DNA, 22 bp, Homo Sapiens
tacacctgccatgtgcagcatg

SEQ ID NO: 3169 - DNA, 22 bp, Homo Sapiens
acacctgccatgtgcagcatga

SEQ ID NO: 3170 - DNA, 22 bp, Homo Sapiens
cacctgccatgtgcagcatgag

SEQ ID NO: 3171 - DNA, 22 bp, Homo Sapiens
acctgccatgtgcagcatgagg

SEQ ID NO: 3172 - DNA, 22 bp, Homo Sapiens
ctgccatgtgcagcatgagggt

SEQ ID NO: 3173 - DNA, 22 bp, Homo Sapiens
tgccatgtgcagcatgagggtt

SEQ ID NO: 3174 - DNA, 22 bp, Homo Sapiens
gccatgtgcagcatgagggttt

SEQ ID NO: 3175 - DNA, 22 bp, Homo Sapiens
ccatgtgcagcatgagggtttg

SEQ ID NO: 3176 - DNA, 22 bp, Homo Sapiens
catgtgcagcatgagggtttgc

SEQ ID NO: 3177 - DNA, 22 bp, Homo Sapiens
atgtgcagcatgagggtttgcc

SEQ ID NO: 3178 - DNA, 22 bp, Homo Sapiens
tgtgcagcatgagggtttgccc

SEQ ID NO: 3179 - DNA, 22 bp, Homo Sapiens
gtgcagcatgagggtttgccca

SEQ ID NO: 3180 - DNA, 22 bp, Homo Sapiens
tgcagcatgagggtttgcccaa

SEQ ID NO: 3181 - DNA, 22 bp, Homo Sapiens
gcagcatgagggtttgcccaag

SEQ ID NO: 3182 - DNA, 22 bp, Homo Sapiens
cagcatgagggtttgcccaagc

SEQ ID NO: 3183 - DNA, 22 bp, Homo Sapiens
agcatgagggtttgcccaagcc

SEQ ID NO: 3184 - DNA, 22 bp, Homo Sapiens
accctgagatgggagccgtctt

SEQ ID NO: 3185 - DNA, 22 bp, Homo Sapiens
tgagatgggagccgtcttccca

SEQ ID NO: 3186 - DNA, 22 bp, Homo Sapiens
cccatcgtgggcatcattgctg

SEQ ID NO: 3187 - DNA, 22 bp, Homo Sapiens
ccatcgtgggcatcattgctgg

SEQ ID NO: 3188 - DNA, 22 bp, Homo Sapiens
catcgtgggcatcattgctggc

SEQ ID NO: 3189 - DNA, 22 bp, Homo Sapiens
atcgtgggcatcattgctggcc

SEQ ID NO: 3190 - DNA, 22 bp, Homo Sapiens
tcgtgggcatcattgctggcct

SEQ ID NO: 3191 - DNA, 22 bp, Homo Sapiens
tgggcatcattgctggcctggt

SEQ ID NO: 3192 - DNA, 22 bp, Homo Sapiens
gggcatcattgctggcctggtt

SEQ ID NO: 3193 - DNA, 22 bp, Homo Sapiens
ggcatcattgctggcctggttc

SEQ ID NO: 3194 - DNA, 22 bp, Homo Sapiens
gcatcattgctggcctggttct

SEQ ID NO: 3195 - DNA, 22 bp, Homo Sapiens
catcattgctggcctggttctc

SEQ ID NO: 3196 - DNA, 22 bp, Homo Sapiens
atcattgctggcctggttctct

SEQ ID NO: 3197 - DNA, 22 bp, Homo Sapiens
tcattgctggcctggttctctt

SEQ ID NO: 3198 - DNA, 22 bp, Homo Sapiens
cattgctggcctggttctcttt

SEQ ID NO: 3199 - DNA, 22 bp, Homo Sapiens
attgctggcctggttctctttg

SEQ ID NO: 3200 - DNA, 22 bp, Homo Sapiens
ttgctggcctggttctctttgg

SEQ ID NO: 3201 - DNA, 22 bp, Homo Sapiens
tgctggcctggttctctttgga

SEQ ID NO: 3202 - DNA, 22 bp, Homo Sapiens
gctggcctggttctctttggag

SEQ ID NO: 3203 - DNA, 22 bp, Homo Sapiens
ctggcctggttctctttggagc

SEQ ID NO: 3204 - DNA, 22 bp, Homo Sapiens
tggcctggttctctttggagct

SEQ ID NO: 3205 - DNA, 22 bp, Homo Sapiens
ggcctggttctctttggagctg

SEQ ID NO: 3206 - DNA, 22 bp, Homo Sapiens
gcctggttctctttggagctgt

SEQ ID NO: 3207 - DNA, 22 bp, Homo Sapiens
cctggttctctttggagctgtg

SEQ ID NO: 3208 - DNA, 22 bp, Homo Sapiens
ctggttctctttggagctgtga

SEQ ID NO: 3209 - DNA, 22 bp, Homo Sapiens
tggttctctttggagctgtgat

SEQ ID NO: 3210 - DNA, 22 bp, Homo Sapiens
ggttctctttggagctgtgatc

SEQ ID NO: 3211 - DNA, 22 bp, Homo Sapiens
gttctctttggagctgtgatca

SEQ ID NO: 3212 - DNA, 22 bp, Homo Sapiens
ttctctttggagctgtgatcac

SEQ ID NO: 3213 - DNA, 22 bp, Homo Sapiens
tctctttggagctgtgatcact

SEQ ID NO: 3214 - DNA, 22 bp, Homo Sapiens
ctctttggagctgtgatcactg

SEQ ID NO: 3215 - DNA, 22 bp, Homo Sapiens
tctttggagctgtgatcactgg

SEQ ID NO: 3216 - DNA, 22 bp, Homo Sapiens
ctttggagctgtgatcactgga

SEQ ID NO: 3217 - DNA, 22 bp, Homo Sapiens
tttggagctgtgatcactggag

SEQ ID NO: 3218 - DNA, 22 bp, Homo Sapiens
ttggagctgtgatcactggagc

SEQ ID NO: 3219 - DNA, 22 bp, Homo Sapiens
tggagctgtgatcactggagct

SEQ ID NO: 3220 - DNA, 22 bp, Homo Sapiens
ggagctgtgatcactggagctg

SEQ ID NO: 3221 - DNA, 22 bp, Homo Sapiens
gagctgtgatcactggagctgt

SEQ ID NO: 3222 - DNA, 22 bp, Homo Sapiens
agctgtgatcactggagctgtg

SEQ ID NO: 3223 - DNA, 22 bp, Homo Sapiens
gctgtgatcactggagctgtgg

SEQ ID NO: 3224 - DNA, 22 bp, Homo Sapiens
ctgtgatcactggagctgtggt

SEQ ID NO: 3225 - DNA, 22 bp, Homo Sapiens
tgtgatcactggagctgtggtc

SEQ ID NO: 3226 - DNA, 22 bp, Homo Sapiens
gtgatcactggagctgtggtcg

SEQ ID NO: 3227 - DNA, 22 bp, Homo Sapiens
tgatcactggagctgtggtcgc

SEQ ID NO: 3228 - DNA, 22 bp, Homo Sapiens
gatcactggagctgtggtcgct

SEQ ID NO: 3229 - DNA, 22 bp, Homo Sapiens
atcactggagctgtggtcgctg

SEQ ID NO: 3230 - DNA, 22 bp, Homo Sapiens
gagctgtggtcgctgctgtgat

SEQ ID NO: 3231 - DNA, 22 bp, Homo Sapiens
agctgtggtcgctgctgtgatg

SEQ ID NO: 3232 - DNA, 22 bp, Homo Sapiens
gctgtggtcgctgctgtgatgt

SEQ ID NO: 3233 - DNA, 22 bp, Homo Sapiens
ctgtggtcgctgctgtgatgtg

SEQ ID NO: 3234 - DNA, 22 bp, Homo Sapiens
tgtggtcgctgctgtgatgtgg

SEQ ID NO: 3235 - DNA, 22 bp, Homo Sapiens
gtggtcgctgctgtgatgtgga

SEQ ID NO: 3236 - DNA, 22 bp, Homo Sapiens
tggtcgctgctgtgatgtggag

SEQ ID NO: 3237 - DNA, 22 bp, Homo Sapiens
gtcgctgctgtgatgtggagga

SEQ ID NO: 3238 - DNA, 22 bp, Homo Sapiens
tcgctgctgtgatgtggaggag

SEQ ID NO: 3239 - DNA, 22 bp, Homo Sapiens
gctgctgtgatgtggaggagga

SEQ ID NO: 3240 - DNA, 22 bp, Homo Sapiens
ctgctgtgatgtggaggaggaa

SEQ ID NO: 3241 - DNA, 22 bp, Homo Sapiens
tgctgtgatgtggaggaggaag

SEQ ID NO: 3242 - DNA, 22 bp, Homo Sapiens
gctgtgatgtggaggaggaaga

SEQ ID NO: 3243 - DNA, 22 bp, Homo Sapiens
ctgtgatgtggaggaggaagag

SEQ ID NO: 3244 - DNA, 22 bp, Homo Sapiens
tgtgatgtggaggaggaagagc

SEQ ID NO: 3245 - DNA, 22 bp, Homo Sapiens
gtgatgtggaggaggaagagct

SEQ ID NO: 3246 - DNA, 22 bp, Homo Sapiens
tgatgtggaggaggaagagctc

SEQ ID NO: 3247 - DNA, 22 bp, Homo Sapiens
gatgtggaggaggaagagctca

SEQ ID NO: 3248 - DNA, 22 bp, Homo Sapiens
atgtggaggaggaagagctcag

SEQ ID NO: 3249 - DNA, 22 bp, Homo Sapiens
tgtggaggaggaagagctcaga

SEQ ID NO: 3250 - DNA, 22 bp, Homo Sapiens
gtggaggaggaagagctcagat

SEQ ID NO: 3251 - DNA, 22 bp, Homo Sapiens
tggaggaggaagagctcagata

SEQ ID NO: 3252 - DNA, 22 bp, Homo Sapiens
ggaggaggaagagctcagatag

SEQ ID NO: 3253 - DNA, 22 bp, Homo Sapiens
gaggaggaagagctcagataga

SEQ ID NO: 3254 - DNA, 22 bp, Homo Sapiens
aggaggaagagctcagatagaa

SEQ ID NO: 3255 - DNA, 22 bp, Homo Sapiens
ggaggaagagctcagatagaaa

SEQ ID NO: 3256 - DNA, 22 bp, Homo Sapiens
aaaggagggagctactctcagg

SEQ ID NO: 3257 - DNA, 22 bp, Homo Sapiens
aaggagggagctactctcaggc

SEQ ID NO: 3258 - DNA, 22 bp, Homo Sapiens
aggagggagctactctcaggct

SEQ ID NO: 3259 - DNA, 22 bp, Homo Sapiens
agggagctactctcaggctgca

SEQ ID NO: 3260 - DNA, 22 bp, Homo Sapiens
gggagctactctcaggctgcaa

SEQ ID NO: 3261 - DNA, 22 bp, Homo Sapiens
ggagctactctcaggctgcaag

SEQ ID NO: 3262 - DNA, 22 bp, Homo Sapiens
gagctactctcaggctgcaagc

SEQ ID NO: 3263 - DNA, 22 bp, Homo Sapiens
agctactctcaggctgcaagca

SEQ ID NO: 3264 - DNA, 22 bp, Homo Sapiens
gctactctcaggctgcaagcag

SEQ ID NO: 3265 - DNA, 22 bp, Homo Sapiens
ctactctcaggctgcaagcagt

SEQ ID NO: 3266 - DNA, 22 bp, Homo Sapiens
tactctcaggctgcaagcagtg

SEQ ID NO: 3267 - DNA, 22 bp, Homo Sapiens
actctcaggctgcaagcagtga

SEQ ID NO: 3268 - DNA, 22 bp, Homo Sapiens
ctctcaggctgcaagcagtgac

SEQ ID NO: 3269 - DNA, 22 bp, Homo Sapiens
tctcaggctgcaagcagtgaca

SEQ ID NO: 3270 - DNA, 22 bp, Homo Sapiens
ctcaggctgcaagcagtgacag

SEQ ID NO: 3271 - DNA, 22 bp, Homo Sapiens
tcaggctgcaagcagtgacagt

SEQ ID NO: 3272 - DNA, 22 bp, Homo Sapiens
caggctgcaagcagtgacagtg

SEQ ID NO: 3273 - DNA, 22 bp, Homo Sapiens
aggctgcaagcagtgacagtgc

SEQ ID NO: 3274 - DNA, 22 bp, Homo Sapiens
ctgcaagcagtgacagtgccca

SEQ ID NO: 3275 - DNA, 22 bp, Homo Sapiens
tgcaagcagtgacagtgcccag

SEQ ID NO: 3276 - DNA, 22 bp, Homo Sapiens
tgacagtgcccagggctctgat

SEQ ID NO: 3277 - DNA, 22 bp, Homo Sapiens
acagtgcccagggctctgatgt

SEQ ID NO: 3278 - DNA, 22 bp, Homo Sapiens
agtgcccagggctctgatgtgt

SEQ ID NO: 3279 - DNA, 22 bp, Homo Sapiens
tgcccagggctctgatgtgtct

SEQ ID NO: 3280 - DNA, 22 bp, Homo Sapiens
cccagggctctgatgtgtctct

SEQ ID NO: 3281 - DNA, 22 bp, Homo Sapiens
ccagggctctgatgtgtctctc

SEQ ID NO: 3282 - DNA, 22 bp, Homo Sapiens
cagggctctgatgtgtctctca

SEQ ID NO: 3283 - DNA, 22 bp, Homo Sapiens
agggctctgatgtgtctctcac

SEQ ID NO: 3284 - DNA, 22 bp, Homo Sapiens
gggctctgatgtgtctctcaca

SEQ ID NO: 3285 - DNA, 22 bp, Homo Sapiens
ggctctgatgtgtctctcacag

SEQ ID NO: 3286 - DNA, 22 bp, Homo Sapiens
gctctgatgtgtctctcacagc

SEQ ID NO: 3287 - DNA, 22 bp, Homo Sapiens
ctctgatgtgtctctcacagct

SEQ ID NO: 3288 - DNA, 22 bp, Homo Sapiens
tctgatgtgtctctcacagctt

SEQ ID NO: 3289 - DNA, 22 bp, Homo Sapiens
ctgatgtgtctctcacagcttg

SEQ ID NO: 3290 - DNA, 22 bp, Homo Sapiens
tgatgtgtctctcacagcttgt

SEQ ID NO: 3291 - DNA, 22 bp, Homo Sapiens
gatgtgtctctcacagcttgta

SEQ ID NO: 3292 - DNA, 22 bp, Homo Sapiens
atgtgtctctcacagcttgtaa

SEQ ID NO: 3293 - DNA, 22 bp, Homo Sapiens
tgtgtctctcacagcttgtaaa

SEQ ID NO: 3294 - DNA, 22 bp, Homo Sapiens
gtgtctctcacagcttgtaaag

SEQ ID NO: 3295 - DNA, 22 bp, Homo Sapiens
tgtctctcacagcttgtaaagt

SEQ ID NO: 3296 - DNA, 22 bp, Homo Sapiens
gtctctcacagcttgtaaagtg

SEQ ID NO: 3297 - DNA, 22 bp, Homo Sapiens
tctctcacagcttgtaaagtgt

SEQ ID NO: 3298 - DNA, 22 bp, Homo Sapiens
ctctcacagcttgtaaagtgtg

SEQ ID NO: 3299 - DNA, 22 bp, Homo Sapiens
tctcacagcttgtaaagtgtga

SEQ ID NO: 3300 - DNA, 22 bp, Homo Sapiens
ctcacagcttgtaaagtgtgag

SEQ ID NO: 3301 - DNA, 22 bp, Homo Sapiens
tcacagcttgtaaagtgtgaga

SEQ ID NO: 3302 - DNA, 22 bp, Homo Sapiens
cacagcttgtaaagtgtgagac

SEQ ID NO: 3303 - DNA, 22 bp, Homo Sapiens
acagcttgtaaagtgtgagaca

SEQ ID NO: 3304 - DNA, 22 bp, Homo Sapiens
cagcttgtaaagtgtgagacag

SEQ ID NO: 3305 - DNA, 22 bp, Homo Sapiens
agcttgtaaagtgtgagacagc

SEQ ID NO: 3306 - DNA, 22 bp, Homo Sapiens
gcttgtaaagtgtgagacagct

SEQ ID NO: 3307 - DNA, 22 bp, Homo Sapiens
cttgtaaagtgtgagacagctg

SEQ ID NO: 3308 - DNA, 22 bp, Homo Sapiens
ttgtaaagtgtgagacagctgc

SEQ ID NO: 3309 - DNA, 22 bp, Homo Sapiens
tgtaaagtgtgagacagctgcc

SEQ ID NO: 3310 - DNA, 22 bp, Homo Sapiens
gtaaagtgtgagacagctgcct

SEQ ID NO: 3311 - DNA, 22 bp, Homo Sapiens
taaagtgtgagacagctgcctt

SEQ ID NO: 3312 - DNA, 22 bp, Homo Sapiens
aaagtgtgagacagctgccttg

SEQ ID NO: 3313 - DNA, 22 bp, Homo Sapiens
aagtgtgagacagctgccttgt

SEQ ID NO: 3314 - DNA, 22 bp, Homo Sapiens
agtgtgagacagctgccttgtg

SEQ ID NO: 3315 - DNA, 22 bp, Homo Sapiens
gtgtgagacagctgccttgtgt

SEQ ID NO: 3316 - DNA, 22 bp, Homo Sapiens
tgtgagacagctgccttgtgtg

SEQ ID NO: 3317 - DNA, 22 bp, Homo Sapiens
gtgagacagctgccttgtgtgg

SEQ ID NO: 3318 - DNA, 22 bp, Homo Sapiens
tgagacagctgccttgtgtggg

SEQ ID NO: 3319 - DNA, 22 bp, Homo Sapiens
gagacagctgccttgtgtggga

SEQ ID NO: 3320 - DNA, 22 bp, Homo Sapiens
agacagctgccttgtgtgggac

SEQ ID NO: 3321 - DNA, 22 bp, Homo Sapiens
gacagctgccttgtgtgggact

SEQ ID NO: 3322 - DNA, 22 bp, Homo Sapiens
acagctgccttgtgtgggactg

SEQ ID NO: 3323 - DNA, 22 bp, Homo Sapiens
cagctgccttgtgtgggactga

SEQ ID NO: 3324 - DNA, 22 bp, Homo Sapiens
agctgccttgtgtgggactgag

SEQ ID NO: 3325 - DNA, 22 bp, Homo Sapiens
gctgccttgtgtgggactgaga

SEQ ID NO: 3326 - DNA, 22 bp, Homo Sapiens
ctgccttgtgtgggactgagag

SEQ ID NO: 3327 - DNA, 22 bp, Homo Sapiens
tgccttgtgtgggactgagagg

SEQ ID NO: 3328 - DNA, 22 bp, Homo Sapiens
ccttgtgtgggactgagaggca

SEQ ID NO: 3329 - DNA, 22 bp, Homo Sapiens
cttgtgtgggactgagaggcaa

SEQ ID NO: 3330 - DNA, 22 bp, Homo Sapiens
ttgtgtgggactgagaggcaag

SEQ ID NO: 3331 - DNA, 22 bp, Homo Sapiens
tgtgtgggactgagaggcaaga

SEQ ID NO: 3332 - DNA, 22 bp, Homo Sapiens
gtgtgggactgagaggcaagag

SEQ ID NO: 3333 - DNA, 22 bp, Homo Sapiens
tgtgggactgagaggcaagagt

SEQ ID NO: 3334 - DNA, 22 bp, Homo Sapiens
gtgggactgagaggcaagagtt

SEQ ID NO: 3335 - DNA, 22 bp, Homo Sapiens
tgggactgagaggcaagagttg

SEQ ID NO: 3336 - DNA, 22 bp, Homo Sapiens
gggactgagaggcaagagttgt

SEQ ID NO: 3337 - DNA, 22 bp, Homo Sapiens
ggactgagaggcaagagttgtt

SEQ ID NO: 3338 - DNA, 22 bp, Homo Sapiens
gactgagaggcaagagttgttc

SEQ ID NO: 3339 - DNA, 22 bp, Homo Sapiens
actgagaggcaagagttgttcc

SEQ ID NO: 3340 - DNA, 22 bp, Homo Sapiens
ctgagaggcaagagttgttcct

SEQ ID NO: 3341 - DNA, 22 bp, Homo Sapiens
tgagaggcaagagttgttcctg

SEQ ID NO: 3342 - DNA, 22 bp, Homo Sapiens
gagaggcaagagttgttcctgc

SEQ ID NO: 3343 - DNA, 22 bp, Homo Sapiens
agaggcaagagttgttcctgcc

SEQ ID NO: 3344 - DNA, 22 bp, Homo Sapiens
gaggcaagagttgttcctgccc

SEQ ID NO: 3345 - DNA, 22 bp, Homo Sapiens
aggcaagagttgttcctgccct

SEQ ID NO: 3346 - DNA, 22 bp, Homo Sapiens
ggcaagagttgttcctgccctt

SEQ ID NO: 3347 - DNA, 22 bp, Homo Sapiens
gcaagagttgttcctgcccttc

SEQ ID NO: 3348 - DNA, 22 bp, Homo Sapiens
caagagttgttcctgcccttcc

SEQ ID NO: 3349 - DNA, 22 bp, Homo Sapiens
aagagttgttcctgcccttccc

SEQ ID NO: 3350 - DNA, 22 bp, Homo Sapiens
agagttgttcctgcccttccct

SEQ ID NO: 3351 - DNA, 22 bp, Homo Sapiens
gagttgttcctgcccttccctt

SEQ ID NO: 3352 - DNA, 22 bp, Homo Sapiens
agttgttcctgcccttcccttt

SEQ ID NO: 3353 - DNA, 22 bp, Homo Sapiens
gttgttcctgcccttccctttg

SEQ ID NO: 3354 - DNA, 22 bp, Homo Sapiens
ttgttcctgcccttccctttgt

SEQ ID NO: 3355 - DNA, 22 bp, Homo Sapiens
tgttcctgcccttccctttgtg

SEQ ID NO: 3356 - DNA, 22 bp, Homo Sapiens
gttcctgcccttccctttgtga

SEQ ID NO: 3357 - DNA, 22 bp, Homo Sapiens
ttcctgcccttccctttgtgac

SEQ ID NO: 3358 - DNA, 22 bp, Homo Sapiens
tcctgcccttccctttgtgact

SEQ ID NO: 3359 - DNA, 22 bp, Homo Sapiens
cctgcccttccctttgtgactt

SEQ ID NO: 3360 - DNA, 22 bp, Homo Sapiens
ctgcccttccctttgtgacttg

SEQ ID NO: 3361 - DNA, 22 bp, Homo Sapiens
tgcccttccctttgtgacttga

SEQ ID NO: 3362 - DNA, 22 bp, Homo Sapiens
gcccttccctttgtgacttgaa

SEQ ID NO: 3363 - DNA, 22 bp, Homo Sapiens
cccttccctttgtgacttgaag

SEQ ID NO: 3364 - DNA, 22 bp, Homo Sapiens
ccttccctttgtgacttgaaga

SEQ ID NO: 3365 - DNA, 22 bp, Homo Sapiens
cttccctttgtgacttgaagaa

SEQ ID NO: 3366 - DNA, 22 bp, Homo Sapiens
ttccctttgtgacttgaagaac

SEQ ID NO: 3367 - DNA, 22 bp, Homo Sapiens
tccctttgtgacttgaagaacc

SEQ ID NO: 3368 - DNA, 22 bp, Homo Sapiens
ccctttgtgacttgaagaaccc

SEQ ID NO: 3369 - DNA, 22 bp, Homo Sapiens
cctttgtgacttgaagaaccct

SEQ ID NO: 3370 - DNA, 22 bp, Homo Sapiens
ctttgtgacttgaagaaccctg

SEQ ID NO: 3371 - DNA, 22 bp, Homo Sapiens
tttgtgacttgaagaaccctga

SEQ ID NO: 3372 - DNA, 22 bp, Homo Sapiens
ttgtgacttgaagaaccctgac

SEQ ID NO: 3373 - DNA, 22 bp, Homo Sapiens
tgtgacttgaagaaccctgact

SEQ ID NO: 3374 - DNA, 22 bp, Homo Sapiens
gtgacttgaagaaccctgactt

SEQ ID NO: 3375 - DNA, 22 bp, Homo Sapiens
tgacttgaagaaccctgacttt

SEQ ID NO: 3376 - DNA, 22 bp, Homo Sapiens
gacttgaagaaccctgactttg

SEQ ID NO: 3377 - DNA, 22 bp, Homo Sapiens
acttgaagaaccctgactttgt

SEQ ID NO: 3378 - DNA, 22 bp, Homo Sapiens
cttgaagaaccctgactttgtt

SEQ ID NO: 3379 - DNA, 22 bp, Homo Sapiens
ttgaagaaccctgactttgttt

SEQ ID NO: 3380 - DNA, 22 bp, Homo Sapiens
tgaagaaccctgactttgtttc

SEQ ID NO: 3381 - DNA, 22 bp, Homo Sapiens
gaagaaccctgactttgtttct

SEQ ID NO: 3382 - DNA, 22 bp, Homo Sapiens
aagaaccctgactttgtttctg

SEQ ID NO: 3383 - DNA, 22 bp, Homo Sapiens
agaaccctgactttgtttctgc

SEQ ID NO: 3384 - DNA, 22 bp, Homo Sapiens
gaaccctgactttgtttctgca

SEQ ID NO: 3385 - DNA, 22 bp, Homo Sapiens
aaccctgactttgtttctgcaa

SEQ ID NO: 3386 - DNA, 22 bp, Homo Sapiens
accctgactttgtttctgcaaa

SEQ ID NO: 3387 - DNA, 22 bp, Homo Sapiens
ccctgactttgtttctgcaaag

SEQ ID NO: 3388 - DNA, 22 bp, Homo Sapiens
cctgactttgtttctgcaaagg

SEQ ID NO: 3389 - DNA, 22 bp, Homo Sapiens
ctgactttgtttctgcaaaggc

SEQ ID NO: 3390 - DNA, 22 bp, Homo Sapiens
tgactttgtttctgcaaaggca

SEQ ID NO: 3391 - DNA, 22 bp, Homo Sapiens
gactttgtttctgcaaaggcac

SEQ ID NO: 3392 - DNA, 22 bp, Homo Sapiens
actttgtttctgcaaaggcacc

SEQ ID NO: 3393 - DNA, 22 bp, Homo Sapiens
ctttgtttctgcaaaggcacct

SEQ ID NO: 3394 - DNA, 22 bp, Homo Sapiens
tttgtttctgcaaaggcacctg

SEQ ID NO: 3395 - DNA, 22 bp, Homo Sapiens
ttgtttctgcaaaggcacctgc

SEQ ID NO: 3396 - DNA, 22 bp, Homo Sapiens
tgtttctgcaaaggcacctgca

SEQ ID NO: 3397 - DNA, 22 bp, Homo Sapiens
gtttctgcaaaggcacctgcat

SEQ ID NO: 3398 - DNA, 22 bp, Homo Sapiens
tttctgcaaaggcacctgcatg

SEQ ID NO: 3399 - DNA, 22 bp, Homo Sapiens
ttctgcaaaggcacctgcatgt

SEQ ID NO: 3400 - DNA, 22 bp, Homo Sapiens
tctgcaaaggcacctgcatgtg

SEQ ID NO: 3401 - DNA, 22 bp, Homo Sapiens
ctgcaaaggcacctgcatgtgt

SEQ ID NO: 3402 - DNA, 22 bp, Homo Sapiens
tgcaaaggcacctgcatgtgtc

SEQ ID NO: 3403 - DNA, 22 bp, Homo Sapiens
gcaaaggcacctgcatgtgtct

SEQ ID NO: 3404 - DNA, 22 bp, Homo Sapiens
caaaggcacctgcatgtgtctg

SEQ ID NO: 3405 - DNA, 22 bp, Homo Sapiens
aaaggcacctgcatgtgtctgt

SEQ ID NO: 3406 - DNA, 22 bp, Homo Sapiens
aaggcacctgcatgtgtctgtg

SEQ ID NO: 3407 - DNA, 22 bp, Homo Sapiens
aggcacctgcatgtgtctgtgt

SEQ ID NO: 3408 - DNA, 22 bp, Homo Sapiens
ggcacctgcatgtgtctgtgtt

SEQ ID NO: 3409 - DNA, 22 bp, Homo Sapiens
gcacctgcatgtgtctgtgttc

SEQ ID NO: 3410 - DNA, 22 bp, Homo Sapiens
cacctgcatgtgtctgtgttcg

SEQ ID NO: 3411 - DNA, 22 bp, Homo Sapiens
acctgcatgtgtctgtgttcgt

SEQ ID NO: 3412 - DNA, 22 bp, Homo Sapiens
cctgcatgtgtctgtgttcgtg

SEQ ID NO: 3413 - DNA, 22 bp, Homo Sapiens
ctgcatgtgtctgtgttcgtgt

SEQ ID NO: 3414 - DNA, 22 bp, Homo Sapiens
tgcatgtgtctgtgttcgtgta

SEQ ID NO: 3415 - DNA, 22 bp, Homo Sapiens
gcatgtgtctgtgttcgtgtag

SEQ ID NO: 3416 - DNA, 22 bp, Homo Sapiens
catgtgtctgtgttcgtgtagg

SEQ ID NO: 3417 - DNA, 22 bp, Homo Sapiens
atgtgtctgtgttcgtgtaggc

SEQ ID NO: 3418 - DNA, 22 bp, Homo Sapiens
tgtgtctgtgttcgtgtaggca

SEQ ID NO: 3419 - DNA, 22 bp, Homo Sapiens
gtgtctgtgttcgtgtaggcat

SEQ ID NO: 3420 - DNA, 22 bp, Homo Sapiens
tgtctgtgttcgtgtaggcata

SEQ ID NO: 3421 - DNA, 22 bp, Homo Sapiens
gtctgtgttcgtgtaggcataa

SEQ ID NO: 3422 - DNA, 22 bp, Homo Sapiens
tctgtgttcgtgtaggcataat

SEQ ID NO: 3423 - DNA, 22 bp, Homo Sapiens
ctgtgttcgtgtaggcataatg

SEQ ID NO: 3424 - DNA, 22 bp, Homo Sapiens
tgtgttcgtgtaggcataatgt

SEQ ID NO: 3425 - DNA, 22 bp, Homo Sapiens
gtgttcgtgtaggcataatgtg

SEQ ID NO: 3426 - DNA, 22 bp, Homo Sapiens
tgttcgtgtaggcataatgtga

SEQ ID NO: 3427 - DNA, 22 bp, Homo Sapiens
gttcgtgtaggcataatgtgag

SEQ ID NO: 3428 - DNA, 22 bp, Homo Sapiens
ttcgtgtaggcataatgtgagg

SEQ ID NO: 3429 - DNA, 22 bp, Homo Sapiens
tcgtgtaggcataatgtgagga

SEQ ID NO: 3430 - DNA, 22 bp, Homo Sapiens
cgtgtaggcataatgtgaggag

SEQ ID NO: 3431 - DNA, 22 bp, Homo Sapiens
gtgtaggcataatgtgaggagg

SEQ ID NO: 3432 - DNA, 22 bp, Homo Sapiens
tgtaggcataatgtgaggaggt

SEQ ID NO: 3433 - DNA, 22 bp, Homo Sapiens
gtaggcataatgtgaggaggtg

SEQ ID NO: 3434 - DNA, 22 bp, Homo Sapiens
taggcataatgtgaggaggtgg

SEQ ID NO: 3435 - DNA, 22 bp, Homo Sapiens
aggcataatgtgaggaggtggg

SEQ ID NO: 3436 - DNA, 22 bp, Homo Sapiens
cccatgtccaccatgaccctct

SEQ ID NO: 3437 - DNA, 22 bp, Homo Sapiens
ccatgtccaccatgaccctctt

SEQ ID NO: 3438 - DNA, 22 bp, Homo Sapiens
catgtccaccatgaccctcttc

SEQ ID NO: 3439 - DNA, 22 bp, Homo Sapiens
atgtccaccatgaccctcttcc

SEQ ID NO: 3440 - DNA, 22 bp, Homo Sapiens
tgtccaccatgaccctcttccc

SEQ ID NO: 3441 - DNA, 22 bp, Homo Sapiens
gtccaccatgaccctcttccca

SEQ ID NO: 3442 - DNA, 22 bp, Homo Sapiens
tccaccatgaccctcttcccac

SEQ ID NO: 3443 - DNA, 22 bp, Homo Sapiens
accatgaccctcttcccacgct

SEQ ID NO: 3444 - DNA, 22 bp, Homo Sapiens
catgaccctcttcccacgctga

SEQ ID NO: 3445 - DNA, 22 bp, Homo Sapiens
atgaccctcttcccacgctgac

SEQ ID NO: 3446 - DNA, 22 bp, Homo Sapiens
tcttcccacgctgacctgtgct

SEQ ID NO: 3447 - DNA, 22 bp, Homo Sapiens
cccaatcatctttcctgttcca

SEQ ID NO: 3448 - DNA, 22 bp, Homo Sapiens
ccaatcatctttcctgttccag

SEQ ID NO: 3449 - DNA, 22 bp, Homo Sapiens
caatcatctttcctgttccaga

SEQ ID NO: 3450 - DNA, 22 bp, Homo Sapiens
aatcatctttcctgttccagag

SEQ ID NO: 3451 - DNA, 22 bp, Homo Sapiens
atcatctttcctgttccagaga

SEQ ID NO: 3452 - DNA, 22 bp, Homo Sapiens
tcatctttcctgttccagagag

SEQ ID NO: 3453 - DNA, 22 bp, Homo Sapiens
catctttcctgttccagagagg

SEQ ID NO: 3454 - DNA, 22 bp, Homo Sapiens
atctttcctgttccagagaggt

SEQ ID NO: 3455 - DNA, 22 bp, Homo Sapiens
tctttcctgttccagagaggtg

SEQ ID NO: 3456 - DNA, 22 bp, Homo Sapiens
ctttcctgttccagagaggtgg

SEQ ID NO: 3457 - DNA, 22 bp, Homo Sapiens
tttcctgttccagagaggtggg

SEQ ID NO: 3458 - DNA, 22 bp, Homo Sapiens
gggctgaggtgtctccatctct

SEQ ID NO: 3459 - DNA, 22 bp, Homo Sapiens
ggctgaggtgtctccatctctg

SEQ ID NO: 3460 - DNA, 22 bp, Homo Sapiens
gctgaggtgtctccatctctgt

SEQ ID NO: 3461 - DNA, 22 bp, Homo Sapiens
ctgaggtgtctccatctctgtc

SEQ ID NO: 3462 - DNA, 22 bp, Homo Sapiens
tgaggtgtctccatctctgtct

SEQ ID NO: 3463 - DNA, 22 bp, Homo Sapiens
gaggtgtctccatctctgtctc

SEQ ID NO: 3464 - DNA, 22 bp, Homo Sapiens
aggtgtctccatctctgtctca

SEQ ID NO: 3465 - DNA, 22 bp, Homo Sapiens
ggtgtctccatctctgtctcaa

SEQ ID NO: 3466 - DNA, 22 bp, Homo Sapiens
gtgtctccatctctgtctcaac

SEQ ID NO: 3467 - DNA, 22 bp, Homo Sapiens
tgtctccatctctgtctcaact

SEQ ID NO: 3468 - DNA, 22 bp, Homo Sapiens
gtctccatctctgtctcaactt

SEQ ID NO: 3469 - DNA, 22 bp, Homo Sapiens
tctccatctctgtctcaacttc

SEQ ID NO: 3470 - DNA, 22 bp, Homo Sapiens
ctccatctctgtctcaacttca

SEQ ID NO: 3471 - DNA, 22 bp, Homo Sapiens
tccatctctgtctcaacttcat

SEQ ID NO: 3472 - DNA, 22 bp, Homo Sapiens
ccatctctgtctcaacttcatg

SEQ ID NO: 3473 - DNA, 22 bp, Homo Sapiens
catctctgtctcaacttcatgg

SEQ ID NO: 3474 - DNA, 22 bp, Homo Sapiens
atctctgtctcaacttcatggt

SEQ ID NO: 3475 - DNA, 22 bp, Homo Sapiens
tctctgtctcaacttcatggtg

SEQ ID NO: 3476 - DNA, 22 bp, Homo Sapiens
ctctgtctcaacttcatggtgc

SEQ ID NO: 3477 - DNA, 22 bp, Homo Sapiens
tctgtctcaacttcatggtgca

SEQ ID NO: 3478 - DNA, 22 bp, Homo Sapiens
ctgtctcaacttcatggtgcac

SEQ ID NO: 3479 - DNA, 22 bp, Homo Sapiens
tgtctcaacttcatggtgcact

SEQ ID NO: 3480 - DNA, 22 bp, Homo Sapiens
gtctcaacttcatggtgcactg

SEQ ID NO: 3481 - DNA, 22 bp, Homo Sapiens
tctcaacttcatggtgcactga

SEQ ID NO: 3482 - DNA, 22 bp, Homo Sapiens
ctcaacttcatggtgcactgag

SEQ ID NO: 3483 - DNA, 22 bp, Homo Sapiens
tcaacttcatggtgcactgagc

SEQ ID NO: 3484 - DNA, 22 bp, Homo Sapiens
caacttcatggtgcactgagct

SEQ ID NO: 3485 - DNA, 22 bp, Homo Sapiens
aacttcatggtgcactgagctg

SEQ ID NO: 3486 - DNA, 22 bp, Homo Sapiens
acttcatggtgcactgagctgt

SEQ ID NO: 3487 - DNA, 22 bp, Homo Sapiens
cttcatggtgcactgagctgta

SEQ ID NO: 3488 - DNA, 22 bp, Homo Sapiens
ttcatggtgcactgagctgtaa

SEQ ID NO: 3489 - DNA, 22 bp, Homo Sapiens
tcatggtgcactgagctgtaac

SEQ ID NO: 3490 - DNA, 22 bp, Homo Sapiens
catggtgcactgagctgtaact

SEQ ID NO: 3491 - DNA, 22 bp, Homo Sapiens
atggtgcactgagctgtaactt

SEQ ID NO: 3492 - DNA, 22 bp, Homo Sapiens
tggtgcactgagctgtaacttc

SEQ ID NO: 3493 - DNA, 22 bp, Homo Sapiens
ggtgcactgagctgtaacttct

SEQ ID NO: 3494 - DNA, 22 bp, Homo Sapiens
gtgcactgagctgtaacttctt

SEQ ID NO: 3495 - DNA, 22 bp, Homo Sapiens
tgcactgagctgtaacttcttc

SEQ ID NO: 3496 - DNA, 22 bp, Homo Sapiens
gcactgagctgtaacttcttcc

SEQ ID NO: 3497 - DNA, 22 bp, Homo Sapiens
cactgagctgtaacttcttcct

SEQ ID NO: 3498 - DNA, 22 bp, Homo Sapiens
actgagctgtaacttcttcctt

SEQ ID NO: 3499 - DNA, 22 bp, Homo Sapiens
ctgagctgtaacttcttccttc

SEQ ID NO: 3500 - DNA, 22 bp, Homo Sapiens
tgagctgtaacttcttccttcc

SEQ ID NO: 3501 - DNA, 22 bp, Homo Sapiens
gagctgtaacttcttccttccc

SEQ ID NO: 3502 - DNA, 22 bp, Homo Sapiens
agctgtaacttcttccttccct

SEQ ID NO: 3503 - DNA, 22 bp, Homo Sapiens
gctgtaacttcttccttcccta

SEQ ID NO: 3504 - DNA, 22 bp, Homo Sapiens
ctgtaacttcttccttccctat

SEQ ID NO: 3505 - DNA, 22 bp, Homo Sapiens
tgtaacttcttccttccctatt

SEQ ID NO: 3506 - DNA, 22 bp, Homo Sapiens
gtaacttcttccttccctatta

SEQ ID NO: 3507 - DNA, 22 bp, Homo Sapiens
taacttcttccttccctattaa

SEQ ID NO: 3508 - DNA, 22 bp, Homo Sapiens
aacttcttccttccctattaaa

SEQ ID NO: 3509 - DNA, 18 bp, Homo Sapiens
cggtgtatggattgggga

SEQ ID NO: 3510 - DNA, 18 bp, Homo Sapiens
ggtgtatggattggggag

SEQ ID NO: 3511 - DNA, 18 bp, Homo Sapiens
gtgtatggattggggagt

SEQ ID NO: 3512 - DNA, 18 bp, Homo Sapiens
tgtatggattggggagtc

SEQ ID NO: 3513 - DNA, 18 bp, Homo Sapiens
gtatggattggggagtcc

SEQ ID NO: 3514 - DNA, 18 bp, Homo Sapiens
tatggattggggagtccc

SEQ ID NO: 3515 - DNA, 18 bp, Homo Sapiens
atggattggggagtccca

SEQ ID NO: 3516 - DNA, 18 bp, Homo Sapiens
cttggggattccccaact

SEQ ID NO: 3517 - DNA, 18 bp, Homo Sapiens
ttggggattccccaactc

SEQ ID NO: 3518 - DNA, 18 bp, Homo Sapiens
attccccaactccgcagt

SEQ ID NO: 3519 - DNA, 18 bp, Homo Sapiens
ttccccaactccgcagtt

SEQ ID NO: 3520 - DNA, 18 bp, Homo Sapiens
tccccaactccgcagttt

SEQ ID NO: 3521 - DNA, 18 bp, Homo Sapiens
aactccgcagtttctttt

SEQ ID NO: 3522 - DNA, 18 bp, Homo Sapiens
actccgcagtttcttttc

SEQ ID NO: 3523 - DNA, 18 bp, Homo Sapiens
ctccgcagtttcttttct

SEQ ID NO: 3524 - DNA, 18 bp, Homo Sapiens
tccgcagtttcttttctc

SEQ ID NO: 3525 - DNA, 18 bp, Homo Sapiens
ccgcagtttcttttctcc

SEQ ID NO: 3526 - DNA, 18 bp, Homo Sapiens
cgcagtttcttttctccc

SEQ ID NO: 3527 - DNA, 18 bp, Homo Sapiens
gcagtttcttttctccct

SEQ ID NO: 3528 - DNA, 18 bp, Homo Sapiens
cagtttcttttctccctc

SEQ ID NO: 3529 - DNA, 18 bp, Homo Sapiens
agtttcttttctccctct

SEQ ID NO: 3530 - DNA, 18 bp, Homo Sapiens
gtttcttttctccctctc

SEQ ID NO: 3531 - DNA, 18 bp, Homo Sapiens
tttcttttctccctctcc

SEQ ID NO: 3532 - DNA, 18 bp, Homo Sapiens
ttcttttctccctctccc

SEQ ID NO: 3533 - DNA, 18 bp, Homo Sapiens
tcttttctccctctccca

SEQ ID NO: 3534 - DNA, 18 bp, Homo Sapiens
cttttctccctctcccaa

SEQ ID NO: 3535 - DNA, 18 bp, Homo Sapiens
ttttctccctctcccaac

SEQ ID NO: 3536 - DNA, 18 bp, Homo Sapiens
ggactcagattctcccca

SEQ ID NO: 3537 - DNA, 18 bp, Homo Sapiens
gactcagattctccccag

SEQ ID NO: 3538 - DNA, 18 bp, Homo Sapiens
actcagattctccccaga

SEQ ID NO: 3539 - DNA, 18 bp, Homo Sapiens
ctcagattctccccagac

SEQ ID NO: 3540 - DNA, 18 bp, Homo Sapiens
tcagattctccccagacg

SEQ ID NO: 3541 - DNA, 18 bp, Homo Sapiens
agtattgggacggggaga

SEQ ID NO: 3542 - DNA, 18 bp, Homo Sapiens
tattgggacggggagaca

SEQ ID NO: 3543 - DNA, 18 bp, Homo Sapiens
acgcccccaaaacgcata

SEQ ID NO: 3544 - DNA, 18 bp, Homo Sapiens
cgcccccaaaacgcatat

SEQ ID NO: 3545 - DNA, 18 bp, Homo Sapiens
gcccccaaaacgcatatg

SEQ ID NO: 3546 - DNA, 18 bp, Homo Sapiens
cccccaaaacgcatatga

SEQ ID NO: 3547 - DNA, 18 bp, Homo Sapiens
ccccaaaacgcatatgac

SEQ ID NO: 3548 - DNA, 18 bp, Homo Sapiens
cccaaaacgcatatgact

SEQ ID NO: 3549 - DNA, 18 bp, Homo Sapiens
ccaaaacgcatatgactc

SEQ ID NO: 3550 - DNA, 18 bp, Homo Sapiens
caaaacgcatatgactca

SEQ ID NO: 3551 - DNA, 18 bp, Homo Sapiens
aaaacgcatatgactcac

SEQ ID NO: 3552 - DNA, 18 bp, Homo Sapiens
tgcaggggatggaacctt

SEQ ID NO: 3553 - DNA, 18 bp, Homo Sapiens
aggggatggaaccttcca

SEQ ID NO: 3554 - DNA, 18 bp, Homo Sapiens
aagagctcagatagaaaa

SEQ ID NO: 3555 - DNA, 18 bp, Homo Sapiens
agagctcagatagaaaag

SEQ ID NO: 3556 - DNA, 18 bp, Homo Sapiens
gagctcagatagaaaagg

SEQ ID NO: 3557 - DNA, 18 bp, Homo Sapiens
agctcagatagaaaagga

SEQ ID NO: 3558 - DNA, 18 bp, Homo Sapiens
gctcagatagaaaaggag

SEQ ID NO: 3559 - DNA, 18 bp, Homo Sapiens
ctcagatagaaaaggagg

SEQ ID NO: 3560 - DNA, 18 bp, Homo Sapiens
tcagatagaaaaggaggg

SEQ ID NO: 3561 - DNA, 18 bp, Homo Sapiens
cagatagaaaaggaggga

SEQ ID NO: 3562 - DNA, 18 bp, Homo Sapiens
agatagaaaaggagggag

SEQ ID NO: 3563 - DNA, 18 bp, Homo Sapiens
gatagaaaaggagggagc

SEQ ID NO: 3564 - DNA, 18 bp, Homo Sapiens
atagaaaaggagggagct

SEQ ID NO: 3565 - DNA, 18 bp, Homo Sapiens
tagaaaaggagggagcta

SEQ ID NO: 3566 - DNA, 18 bp, Homo Sapiens
agaaaaggagggagctac

SEQ ID NO: 3567 - DNA, 18 bp, Homo Sapiens
gaaaaggagggagctact

SEQ ID NO: 3568 - DNA, 18 bp, Homo Sapiens
aaaaggagggagctactc

SEQ ID NO: 3569 - DNA, 18 bp, Homo Sapiens
taatgtgaggaggtgggg

SEQ ID NO: 3570 - DNA, 18 bp, Homo Sapiens
aatgtgaggaggtgggga

SEQ ID NO: 3571 - DNA, 18 bp, Homo Sapiens
tgctccctccccaatcat

SEQ ID NO: 3572 - DNA, 18 bp, Homo Sapiens
ctccctccccaatcatct

SEQ ID NO: 3573 - DNA, 18 bp, Homo Sapiens
tccctccccaatcatctt

SEQ ID NO: 3574 - DNA, 18 bp, Homo Sapiens
ccctccccaatcatcttt

SEQ ID NO: 3575 - DNA, 18 bp, Homo Sapiens
cctccccaatcatctttc

SEQ ID NO: 3576 - DNA, 18 bp, Homo Sapiens
ctccccaatcatctttcc

SEQ ID NO: 3577 - DNA, 18 bp, Homo Sapiens
tccccaatcatctttcct

SEQ ID NO: 3578 - DNA, 18 bp, Homo Sapiens
ccccaatcatctttcctg

SEQ ID NO: 3579 - DNA, 18 bp, Homo Sapiens
cttccttccctattaaaa

SEQ ID NO: 3580 - DNA, 19 bp, Homo Sapiens
gcggtgtatggattgggga

SEQ ID NO: 3581 - DNA, 19 bp, Homo Sapiens
cggtgtatggattggggag

SEQ ID NO: 3582 - DNA, 19 bp, Homo Sapiens
ggtgtatggattggggagt

SEQ ID NO: 3583 - DNA, 19 bp, Homo Sapiens
gtgtatggattggggagtc

SEQ ID NO: 3584 - DNA, 19 bp, Homo Sapiens
tgtatggattggggagtcc

SEQ ID NO: 3585 - DNA, 19 bp, Homo Sapiens
gtatggattggggagtccc

SEQ ID NO: 3586 - DNA, 19 bp, Homo Sapiens
tatggattggggagtccca

SEQ ID NO: 3587 - DNA, 19 bp, Homo Sapiens
atggattggggagtcccag

SEQ ID NO: 3588 - DNA, 19 bp, Homo Sapiens
attggggagtcccagcctt

SEQ ID NO: 3589 - DNA, 19 bp, Homo Sapiens
agtcccagccttggggatt

SEQ ID NO: 3590 - DNA, 19 bp, Homo Sapiens
agccttggggattccccaa

SEQ ID NO: 3591 - DNA, 19 bp, Homo Sapiens
ccttggggattccccaact

SEQ ID NO: 3592 - DNA, 19 bp, Homo Sapiens
cttggggattccccaactc

SEQ ID NO: 3593 - DNA, 19 bp, Homo Sapiens
ttggggattccccaactcc

SEQ ID NO: 3594 - DNA, 19 bp, Homo Sapiens
gattccccaactccgcagt

SEQ ID NO: 3595 - DNA, 19 bp, Homo Sapiens
attccccaactccgcagtt

SEQ ID NO: 3596 - DNA, 19 bp, Homo Sapiens
ttccccaactccgcagttt

SEQ ID NO: 3597 - DNA, 19 bp, Homo Sapiens
tccccaactccgcagtttc

SEQ ID NO: 3598 - DNA, 19 bp, Homo Sapiens
ccccaactccgcagtttct

SEQ ID NO: 3599 - DNA, 19 bp, Homo Sapiens
caactccgcagtttctttt

SEQ ID NO: 3600 - DNA, 19 bp, Homo Sapiens
aactccgcagtttcttttc

SEQ ID NO: 3601 - DNA, 19 bp, Homo Sapiens
actccgcagtttcttttct

SEQ ID NO: 3602 - DNA, 19 bp, Homo Sapiens
ctccgcagtttcttttctc

SEQ ID NO: 3603 - DNA, 19 bp, Homo Sapiens
tccgcagtttcttttctcc

SEQ ID NO: 3604 - DNA, 19 bp, Homo Sapiens
ccgcagtttcttttctccc

SEQ ID NO: 3605 - DNA, 19 bp, Homo Sapiens
cgcagtttcttttctccct

SEQ ID NO: 3606 - DNA, 19 bp, Homo Sapiens
gcagtttcttttctccctc

SEQ ID NO: 3607 - DNA, 19 bp, Homo Sapiens
cagtttcttttctccctct

SEQ ID NO: 3608 - DNA, 19 bp, Homo Sapiens
agtttcttttctccctctc

SEQ ID NO: 3609 - DNA, 19 bp, Homo Sapiens
gtttcttttctccctctcc

SEQ ID NO: 3610 - DNA, 19 bp, Homo Sapiens
tttcttttctccctctccc

SEQ ID NO: 3611 - DNA, 19 bp, Homo Sapiens
ttcttttctccctctccca

SEQ ID NO: 3612 - DNA, 19 bp, Homo Sapiens
tcttttctccctctcccaa

SEQ ID NO: 3613 - DNA, 19 bp, Homo Sapiens
cttttctccctctcccaac

SEQ ID NO: 3614 - DNA, 19 bp, Homo Sapiens
ttttctccctctcccaacc

SEQ ID NO: 3615 - DNA, 19 bp, Homo Sapiens
gggactcagattctcccca

SEQ ID NO: 3616 - DNA, 19 bp, Homo Sapiens
ggactcagattctccccag

SEQ ID NO: 3617 - DNA, 19 bp, Homo Sapiens
gactcagattctccccaga

SEQ ID NO: 3618 - DNA, 19 bp, Homo Sapiens
actcagattctccccagac

SEQ ID NO: 3619 - DNA, 19 bp, Homo Sapiens
ctcagattctccccagacg

SEQ ID NO: 3620 - DNA, 19 bp, Homo Sapiens
tcagattctccccagacgc

SEQ ID NO: 3621 - DNA, 19 bp, Homo Sapiens
gagtattgggacggggaga

SEQ ID NO: 3622 - DNA, 19 bp, Homo Sapiens
agtattgggacggggagac

SEQ ID NO: 3623 - DNA, 19 bp, Homo Sapiens
gtattgggacggggagaca

SEQ ID NO: 3624 - DNA, 19 bp, Homo Sapiens
tattgggacggggagacac

SEQ ID NO: 3625 - DNA, 19 bp, Homo Sapiens
acggggagacacggaaagt

SEQ ID NO: 3626 - DNA, 19 bp, Homo Sapiens
ggggagacacggaaagtga

SEQ ID NO: 3627 - DNA, 19 bp, Homo Sapiens
tgcgcggctactacaacca

SEQ ID NO: 3628 - DNA, 19 bp, Homo Sapiens
gacgcccccaaaacgcata

SEQ ID NO: 3629 - DNA, 19 bp, Homo Sapiens
acgcccccaaaacgcatat

SEQ ID NO: 3630 - DNA, 19 bp, Homo Sapiens
cgcccccaaaacgcatatg

SEQ ID NO: 3631 - DNA, 19 bp, Homo Sapiens
gcccccaaaacgcatatga

SEQ ID NO: 3632 - DNA, 19 bp, Homo Sapiens
cccccaaaacgcatatgac

SEQ ID NO: 3633 - DNA, 19 bp, Homo Sapiens
ccccaaaacgcatatgact

SEQ ID NO: 3634 - DNA, 19 bp, Homo Sapiens
cccaaaacgcatatgactc

SEQ ID NO: 3635 - DNA, 19 bp, Homo Sapiens
ccaaaacgcatatgactca

SEQ ID NO: 3636 - DNA, 19 bp, Homo Sapiens
caaaacgcatatgactcac

SEQ ID NO: 3637 - DNA, 19 bp, Homo Sapiens
aaaacgcatatgactcacc

SEQ ID NO: 3638 - DNA, 19 bp, Homo Sapiens
ctgcaggggatggaacctt

SEQ ID NO: 3639 - DNA, 19 bp, Homo Sapiens
tgcaggggatggaaccttc

SEQ ID NO: 3640 - DNA, 19 bp, Homo Sapiens
caggggatggaaccttcca

SEQ ID NO: 3641 - DNA, 19 bp, Homo Sapiens
aggggatggaaccttccag

SEQ ID NO: 3642 - DNA, 19 bp, Homo Sapiens
ggggatggaaccttccaga

SEQ ID NO: 3643 - DNA, 19 bp, Homo Sapiens
aagcccctcaccctgagat

SEQ ID NO: 3644 - DNA, 19 bp, Homo Sapiens
atccccatcgtgggcatca

SEQ ID NO: 3645 - DNA, 19 bp, Homo Sapiens
tccccatcgtgggcatcat

SEQ ID NO: 3646 - DNA, 19 bp, Homo Sapiens
ccccatcgtgggcatcatt

SEQ ID NO: 3647 - DNA, 19 bp, Homo Sapiens
gaagagctcagatagaaaa

SEQ ID NO: 3648 - DNA, 19 bp, Homo Sapiens
aagagctcagatagaaaag

SEQ ID NO: 3649 - DNA, 19 bp, Homo Sapiens
agagctcagatagaaaagg

SEQ ID NO: 3650 - DNA, 19 bp, Homo Sapiens
gagctcagatagaaaagga

SEQ ID NO: 3651 - DNA, 19 bp, Homo Sapiens
agctcagatagaaaaggag

SEQ ID NO: 3652 - DNA, 19 bp, Homo Sapiens
gctcagatagaaaaggagg

SEQ ID NO: 3653 - DNA, 19 bp, Homo Sapiens
ctcagatagaaaaggaggg

SEQ ID NO: 3654 - DNA, 19 bp, Homo Sapiens
tcagatagaaaaggaggga

SEQ ID NO: 3655 - DNA, 19 bp, Homo Sapiens
cagatagaaaaggagggag

SEQ ID NO: 3656 - DNA, 19 bp, Homo Sapiens
agatagaaaaggagggagc

SEQ ID NO: 3657 - DNA, 19 bp, Homo Sapiens
gatagaaaaggagggagct

SEQ ID NO: 3658 - DNA, 19 bp, Homo Sapiens
atagaaaaggagggagcta

SEQ ID NO: 3659 - DNA, 19 bp, Homo Sapiens
tagaaaaggagggagctac

SEQ ID NO: 3660 - DNA, 19 bp, Homo Sapiens
agaaaaggagggagctact

SEQ ID NO: 3661 - DNA, 19 bp, Homo Sapiens
gaaaaggagggagctactc

SEQ ID NO: 3662 - DNA, 19 bp, Homo Sapiens
aaaaggagggagctactct

SEQ ID NO: 3663 - DNA, 19 bp, Homo Sapiens
ataatgtgaggaggtgggg

SEQ ID NO: 3664 - DNA, 19 bp, Homo Sapiens
taatgtgaggaggtgggga

SEQ ID NO: 3665 - DNA, 19 bp, Homo Sapiens
aatgtgaggaggtggggag

SEQ ID NO: 3666 - DNA, 19 bp, Homo Sapiens
atgtgaggaggtggggaga

SEQ ID NO: 3667 - DNA, 19 bp, Homo Sapiens
acccccatgtccaccatga

SEQ ID NO: 3668 - DNA, 19 bp, Homo Sapiens
tgtgctccctccccaatca

SEQ ID NO: 3669 - DNA, 19 bp, Homo Sapiens
gtgctccctccccaatcat

SEQ ID NO: 3670 - DNA, 19 bp, Homo Sapiens
tgctccctccccaatcatc

SEQ ID NO: 3671 - DNA, 19 bp, Homo Sapiens
gctccctccccaatcatct

SEQ ID NO: 3672 - DNA, 19 bp, Homo Sapiens
ctccctccccaatcatctt

SEQ ID NO: 3673 - DNA, 19 bp, Homo Sapiens
tccctccccaatcatcttt

SEQ ID NO: 3674 - DNA, 19 bp, Homo Sapiens
ccctccccaatcatctttc

SEQ ID NO: 3675 - DNA, 19 bp, Homo Sapiens
cctccccaatcatctttcc

SEQ ID NO: 3676 - DNA, 19 bp, Homo Sapiens
ctccccaatcatctttcct

SEQ ID NO: 3677 - DNA, 19 bp, Homo Sapiens
tccccaatcatctttcctg

SEQ ID NO: 3678 - DNA, 19 bp, Homo Sapiens
ccccaatcatctttcctgt

SEQ ID NO: 3679 - DNA, 19 bp, Homo Sapiens
tcttccttccctattaaaa

SEQ ID NO: 3680 - DNA, 20 bp, Homo Sapiens
cggtgtatggattggggagt

SEQ ID NO: 3681 - DNA, 20 bp, Homo Sapiens
ggtgtatggattggggagtc

SEQ ID NO: 3682 - DNA, 20 bp, Homo Sapiens
gtgtatggattggggagtcc

SEQ ID NO: 3683 - DNA, 20 bp, Homo Sapiens
tgtatggattggggagtccc

SEQ ID NO: 3684 - DNA, 20 bp, Homo Sapiens
gtatggattggggagtccca

SEQ ID NO: 3685 - DNA, 20 bp, Homo Sapiens
tatggattggggagtcccag

SEQ ID NO: 3686 - DNA, 20 bp, Homo Sapiens
gattccccaactccgcagtt

SEQ ID NO: 3687 - DNA, 20 bp, Homo Sapiens
attccccaactccgcagttt

SEQ ID NO: 3688 - DNA, 20 bp, Homo Sapiens
ttccccaactccgcagtttc

SEQ ID NO: 3689 - DNA, 20 bp, Homo Sapiens
tccccaactccgcagtttct

SEQ ID NO: 3690 - DNA, 20 bp, Homo Sapiens
ccccaactccgcagtttctt

SEQ ID NO: 3691 - DNA, 20 bp, Homo Sapiens
ccaactccgcagtttctttt

SEQ ID NO: 3692 - DNA, 20 bp, Homo Sapiens
caactccgcagtttcttttc

SEQ ID NO: 3693 - DNA, 20 bp, Homo Sapiens
aactccgcagtttcttttct

SEQ ID NO: 3694 - DNA, 20 bp, Homo Sapiens
actccgcagtttcttttctc

SEQ ID NO: 3695 - DNA, 20 bp, Homo Sapiens
ctccgcagtttcttttctcc

SEQ ID NO: 3696 - DNA, 20 bp, Homo Sapiens
tccgcagtttcttttctccc

SEQ ID NO: 3697 - DNA, 20 bp, Homo Sapiens
ccgcagtttcttttctccct

SEQ ID NO: 3698 - DNA, 20 bp, Homo Sapiens
cgcagtttcttttctccctc

SEQ ID NO: 3699 - DNA, 20 bp, Homo Sapiens
gcagtttcttttctccctct

SEQ ID NO: 3700 - DNA, 20 bp, Homo Sapiens
cagtttcttttctccctctc

SEQ ID NO: 3701 - DNA, 20 bp, Homo Sapiens
agtttcttttctccctctcc

SEQ ID NO: 3702 - DNA, 20 bp, Homo Sapiens
gtttcttttctccctctccc

SEQ ID NO: 3703 - DNA, 20 bp, Homo Sapiens
tttcttttctccctctccca

SEQ ID NO: 3704 - DNA, 20 bp, Homo Sapiens
ttcttttctccctctcccaa

SEQ ID NO: 3705 - DNA, 20 bp, Homo Sapiens
tcttttctccctctcccaac

SEQ ID NO: 3706 - DNA, 20 bp, Homo Sapiens
cttttctccctctcccaacc

SEQ ID NO: 3707 - DNA, 20 bp, Homo Sapiens
ttttctccctctcccaacct

SEQ ID NO: 3708 - DNA, 20 bp, Homo Sapiens
ggactcagattctccccaga

SEQ ID NO: 3709 - DNA, 20 bp, Homo Sapiens
gactcagattctccccagac

SEQ ID NO: 3710 - DNA, 20 bp, Homo Sapiens
actcagattctccccagacg

SEQ ID NO: 3711 - DNA, 20 bp, Homo Sapiens
agtattgggacggggagaca

SEQ ID NO: 3712 - DNA, 20 bp, Homo Sapiens
ggggagacacggaaagtgaa

SEQ ID NO: 3713 - DNA, 20 bp, Homo Sapiens
gacgcccccaaaacgcatat

SEQ ID NO: 3714 - DNA, 20 bp, Homo Sapiens
acgcccccaaaacgcatatg

SEQ ID NO: 3715 - DNA, 20 bp, Homo Sapiens
cgcccccaaaacgcatatga

SEQ ID NO: 3716 - DNA, 20 bp, Homo Sapiens
gcccccaaaacgcatatgac

SEQ ID NO: 3717 - DNA, 20 bp, Homo Sapiens
cccccaaaacgcatatgact

SEQ ID NO: 3718 - DNA, 20 bp, Homo Sapiens
ccccaaaacgcatatgactc

SEQ ID NO: 3719 - DNA, 20 bp, Homo Sapiens
cccaaaacgcatatgactca

SEQ ID NO: 3720 - DNA, 20 bp, Homo Sapiens
ccaaaacgcatatgactcac

SEQ ID NO: 3721 - DNA, 20 bp, Homo Sapiens
caaaacgcatatgactcacc

SEQ ID NO: 3722 - DNA, 20 bp, Homo Sapiens
aaaacgcatatgactcacca

SEQ ID NO: 3723 - DNA, 20 bp, Homo Sapiens
aggggatggaaccttccaga

SEQ ID NO: 3724 - DNA, 20 bp, Homo Sapiens
ggggatggaaccttccagaa

SEQ ID NO: 3725 - DNA, 20 bp, Homo Sapiens
atccccatcgtgggcatcat

SEQ ID NO: 3726 - DNA, 20 bp, Homo Sapiens
tccccatcgtgggcatcatt

SEQ ID NO: 3727 - DNA, 20 bp, Homo Sapiens
ggaagagctcagatagaaaa

SEQ ID NO: 3728 - DNA, 20 bp, Homo Sapiens
gaagagctcagatagaaaag

SEQ ID NO: 3729 - DNA, 20 bp, Homo Sapiens
aagagctcagatagaaaagg

SEQ ID NO: 3730 - DNA, 20 bp, Homo Sapiens
agagctcagatagaaaagga

SEQ ID NO: 3731 - DNA, 20 bp, Homo Sapiens
gagctcagatagaaaaggag

SEQ ID NO: 3732 - DNA, 20 bp, Homo Sapiens
agctcagatagaaaaggagg

SEQ ID NO: 3733 - DNA, 20 bp, Homo Sapiens
gctcagatagaaaaggaggg

SEQ ID NO: 3734 - DNA, 20 bp, Homo Sapiens
ctcagatagaaaaggaggga

SEQ ID NO: 3735 - DNA, 20 bp, Homo Sapiens
tcagatagaaaaggagggag

SEQ ID NO: 3736 - DNA, 20 bp, Homo Sapiens
cagatagaaaaggagggagc

SEQ ID NO: 3737 - DNA, 20 bp, Homo Sapiens
agatagaaaaggagggagct

SEQ ID NO: 3738 - DNA, 20 bp, Homo Sapiens
gatagaaaaggagggagcta

SEQ ID NO: 3739 - DNA, 20 bp, Homo Sapiens
atagaaaaggagggagctac

SEQ ID NO: 3740 - DNA, 20 bp, Homo Sapiens
tagaaaaggagggagctact

SEQ ID NO: 3741 - DNA, 20 bp, Homo Sapiens
agaaaaggagggagctactc

SEQ ID NO: 3742 - DNA, 20 bp, Homo Sapiens
gaaaaggagggagctactct

SEQ ID NO: 3743 - DNA, 20 bp, Homo Sapiens
aaaaggagggagctactctc

SEQ ID NO: 3744 - DNA, 20 bp, Homo Sapiens
cataatgtgaggaggtgggg

SEQ ID NO: 3745 - DNA, 20 bp, Homo Sapiens
ataatgtgaggaggtgggga

SEQ ID NO: 3746 - DNA, 20 bp, Homo Sapiens
taatgtgaggaggtggggag

SEQ ID NO: 3747 - DNA, 20 bp, Homo Sapiens
aatgtgaggaggtggggaga

SEQ ID NO: 3748 - DNA, 20 bp, Homo Sapiens
tgtgctccctccccaatcat

SEQ ID NO: 3749 - DNA, 20 bp, Homo Sapiens
tgctccctccccaatcatct

SEQ ID NO: 3750 - DNA, 20 bp, Homo Sapiens
gctccctccccaatcatctt

SEQ ID NO: 3751 - DNA, 20 bp, Homo Sapiens
ctccctccccaatcatcttt

SEQ ID NO: 3752 - DNA, 20 bp, Homo Sapiens
tccctccccaatcatctttc

SEQ ID NO: 3753 - DNA, 20 bp, Homo Sapiens
ccctccccaatcatctttcc

SEQ ID NO: 3754 - DNA, 20 bp, Homo Sapiens
cctccccaatcatctttcct

SEQ ID NO: 3755 - DNA, 20 bp, Homo Sapiens
ctccccaatcatctttcctg

SEQ ID NO: 3756 - DNA, 20 bp, Homo Sapiens
tccccaatcatctttcctgt

SEQ ID NO: 3757 - DNA, 20 bp, Homo Sapiens
ccccaatcatctttcctgtt

SEQ ID NO: 3758 - DNA, 21 bp, Homo Sapiens
aaggcggtgtatggattgggg

SEQ ID NO: 3759 - DNA, 21 bp, Homo Sapiens
aggcggtgtatggattgggga

SEQ ID NO: 3760 - DNA, 21 bp, Homo Sapiens
gcggtgtatggattggggagt

SEQ ID NO: 3761 - DNA, 21 bp, Homo Sapiens
cggtgtatggattggggagtc

SEQ ID NO: 3762 - DNA, 21 bp, Homo Sapiens
ggtgtatggattggggagtcc

SEQ ID NO: 3763 - DNA, 21 bp, Homo Sapiens
gtgtatggattggggagtccc

SEQ ID NO: 3764 - DNA, 21 bp, Homo Sapiens
tgtatggattggggagtccca

SEQ ID NO: 3765 - DNA, 21 bp, Homo Sapiens
gtatggattggggagtcccag

SEQ ID NO: 3766 - DNA, 21 bp, Homo Sapiens
tatggattggggagtcccagc

SEQ ID NO: 3767 - DNA, 21 bp, Homo Sapiens
agccttggggattccccaact

SEQ ID NO: 3768 - DNA, 21 bp, Homo Sapiens
ggattccccaactccgcagtt

SEQ ID NO: 3769 - DNA, 21 bp, Homo Sapiens
gattccccaactccgcagttt

SEQ ID NO: 3770 - DNA, 21 bp, Homo Sapiens
attccccaactccgcagtttc

SEQ ID NO: 3771 - DNA, 21 bp, Homo Sapiens
ttccccaactccgcagtttct

SEQ ID NO: 3772 - DNA, 21 bp, Homo Sapiens
tccccaactccgcagtttctt

SEQ ID NO: 3773 - DNA, 21 bp, Homo Sapiens
ccccaactccgcagtttcttt

SEQ ID NO: 3774 - DNA, 21 bp, Homo Sapiens
cccaactccgcagtttctttt

SEQ ID NO: 3775 - DNA, 21 bp, Homo Sapiens
ccaactccgcagtttcttttc

SEQ ID NO: 3776 - DNA, 21 bp, Homo Sapiens
caactccgcagtttcttttct

SEQ ID NO: 3777 - DNA, 21 bp, Homo Sapiens
aactccgcagtttcttttctc

SEQ ID NO: 3778 - DNA, 21 bp, Homo Sapiens
actccgcagtttcttttctcc

SEQ ID NO: 3779 - DNA, 21 bp, Homo Sapiens
ctccgcagtttcttttctccc

SEQ ID NO: 3780 - DNA, 21 bp, Homo Sapiens
tccgcagtttcttttctccct

SEQ ID NO: 3781 - DNA, 21 bp, Homo Sapiens
ccgcagtttcttttctccctc

SEQ ID NO: 3782 - DNA, 21 bp, Homo Sapiens
cgcagtttcttttctccctct

SEQ ID NO: 3783 - DNA, 21 bp, Homo Sapiens
gcagtttcttttctccctctc

SEQ ID NO: 3784 - DNA, 21 bp, Homo Sapiens
cagtttcttttctccctctcc

SEQ ID NO: 3785 - DNA, 21 bp, Homo Sapiens
agtttcttttctccctctccc

SEQ ID NO: 3786 - DNA, 21 bp, Homo Sapiens
gtttcttttctccctctccca

SEQ ID NO: 3787 - DNA, 21 bp, Homo Sapiens
tttcttttctccctctcccaa

SEQ ID NO: 3788 - DNA, 21 bp, Homo Sapiens
ttcttttctccctctcccaac

SEQ ID NO: 3789 - DNA, 21 bp, Homo Sapiens
tcttttctccctctcccaacc

SEQ ID NO: 3790 - DNA, 21 bp, Homo Sapiens
cttttctccctctcccaacct

SEQ ID NO: 3791 - DNA, 21 bp, Homo Sapiens
ttttctccctctcccaaccta

SEQ ID NO: 3792 - DNA, 21 bp, Homo Sapiens
gggactcagattctccccaga

SEQ ID NO: 3793 - DNA, 21 bp, Homo Sapiens
ggactcagattctccccagac

SEQ ID NO: 3794 - DNA, 21 bp, Homo Sapiens
gactcagattctccccagacg

SEQ ID NO: 3795 - DNA, 21 bp, Homo Sapiens
actcagattctccccagacgc

SEQ ID NO: 3796 - DNA, 21 bp, Homo Sapiens
gagtattgggacggggagaca

SEQ ID NO: 3797 - DNA, 21 bp, Homo Sapiens
agtattgggacggggagacac

SEQ ID NO: 3798 - DNA, 21 bp, Homo Sapiens
acggggagacacggaaagtga

SEQ ID NO: 3799 - DNA, 21 bp, Homo Sapiens
cggggagacacggaaagtgaa

SEQ ID NO: 3800 - DNA, 21 bp, Homo Sapiens
ggggagacacggaaagtgaag

SEQ ID NO: 3801 - DNA, 21 bp, Homo Sapiens
tgcgcggctactacaaccaga

SEQ ID NO: 3802 - DNA, 21 bp, Homo Sapiens
ggacgcccccaaaacgcatat

SEQ ID NO: 3803 - DNA, 21 bp, Homo Sapiens
gacgcccccaaaacgcatatg

SEQ ID NO: 3804 - DNA, 21 bp, Homo Sapiens
acgcccccaaaacgcatatga

SEQ ID NO: 3805 - DNA, 21 bp, Homo Sapiens
cgcccccaaaacgcatatgac

SEQ ID NO: 3806 - DNA, 21 bp, Homo Sapiens
gcccccaaaacgcatatgact

SEQ ID NO: 3807 - DNA, 21 bp, Homo Sapiens
cccccaaaacgcatatgactc

SEQ ID NO: 3808 - DNA, 21 bp, Homo Sapiens
ccccaaaacgcatatgactca

SEQ ID NO: 3809 - DNA, 21 bp, Homo Sapiens
cccaaaacgcatatgactcac

SEQ ID NO: 3810 - DNA, 21 bp, Homo Sapiens
ccaaaacgcatatgactcacc

SEQ ID NO: 3811 - DNA, 21 bp, Homo Sapiens
caaaacgcatatgactcacca

SEQ ID NO: 3812 - DNA, 21 bp, Homo Sapiens
aaaacgcatatgactcaccac

SEQ ID NO: 3813 - DNA, 21 bp, Homo Sapiens
tgcaggggatggaaccttcca

SEQ ID NO: 3814 - DNA, 21 bp, Homo Sapiens
caggggatggaaccttccaga

SEQ ID NO: 3815 - DNA, 21 bp, Homo Sapiens
aggggatggaaccttccagaa

SEQ ID NO: 3816 - DNA, 21 bp, Homo Sapiens
ggggatggaaccttccagaag

SEQ ID NO: 3817 - DNA, 21 bp, Homo Sapiens
catccccatcgtgggcatcat

SEQ ID NO: 3818 - DNA, 21 bp, Homo Sapiens
atccccatcgtgggcatcatt

SEQ ID NO: 3819 - DNA, 21 bp, Homo Sapiens
tccccatcgtgggcatcattg

SEQ ID NO: 3820 - DNA, 21 bp, Homo Sapiens
aggaagagctcagatagaaaa

SEQ ID NO: 3821 - DNA, 21 bp, Homo Sapiens
ggaagagctcagatagaaaag

SEQ ID NO: 3822 - DNA, 21 bp, Homo Sapiens
gaagagctcagatagaaaagg

SEQ ID NO: 3823 - DNA, 21 bp, Homo Sapiens
aagagctcagatagaaaagga

SEQ ID NO: 3824 - DNA, 21 bp, Homo Sapiens
agagctcagatagaaaaggag

SEQ ID NO: 3825 - DNA, 21 bp, Homo Sapiens
gagctcagatagaaaaggagg

SEQ ID NO: 3826 - DNA, 21 bp, Homo Sapiens
agctcagatagaaaaggaggg

SEQ ID NO: 3827 - DNA, 21 bp, Homo Sapiens
gctcagatagaaaaggaggga

SEQ ID NO: 3828 - DNA, 21 bp, Homo Sapiens
ctcagatagaaaaggagggag

SEQ ID NO: 3829 - DNA, 21 bp, Homo Sapiens
tcagatagaaaaggagggagc

SEQ ID NO: 3830 - DNA, 21 bp, Homo Sapiens
cagatagaaaaggagggagct

SEQ ID NO: 3831 - DNA, 21 bp, Homo Sapiens
agatagaaaaggagggagcta

SEQ ID NO: 3832 - DNA, 21 bp, Homo Sapiens
gatagaaaaggagggagctac

SEQ ID NO: 3833 - DNA, 21 bp, Homo Sapiens
atagaaaaggagggagctact

SEQ ID NO: 3834 - DNA, 21 bp, Homo Sapiens
tagaaaaggagggagctactc

SEQ ID NO: 3835 - DNA, 21 bp, Homo Sapiens
agaaaaggagggagctactct

SEQ ID NO: 3836 - DNA, 21 bp, Homo Sapiens
gaaaaggagggagctactctc

SEQ ID NO: 3837 - DNA, 21 bp, Homo Sapiens
aaaaggagggagctactctca

SEQ ID NO: 3838 - DNA, 21 bp, Homo Sapiens
gcataatgtgaggaggtgggg

SEQ ID NO: 3839 - DNA, 21 bp, Homo Sapiens
cataatgtgaggaggtgggga

SEQ ID NO: 3840 - DNA, 21 bp, Homo Sapiens
ataatgtgaggaggtggggag

SEQ ID NO: 3841 - DNA, 21 bp, Homo Sapiens
taatgtgaggaggtggggaga

SEQ ID NO: 3842 - DNA, 21 bp, Homo Sapiens
aatgtgaggaggtggggagac

SEQ ID NO: 3843 - DNA, 21 bp, Homo Sapiens
ctgtgctccctccccaatcat

SEQ ID NO: 3844 - DNA, 21 bp, Homo Sapiens
tgtgctccctccccaatcatc

SEQ ID NO: 3845 - DNA, 21 bp, Homo Sapiens
gtgctccctccccaatcatct

SEQ ID NO: 3846 - DNA, 21 bp, Homo Sapiens
tgctccctccccaatcatctt

SEQ ID NO: 3847 - DNA, 21 bp, Homo Sapiens
gctccctccccaatcatcttt

SEQ ID NO: 3848 - DNA, 21 bp, Homo Sapiens
ctccctccccaatcatctttc

SEQ ID NO: 3849 - DNA, 21 bp, Homo Sapiens
tccctccccaatcatctttcc

SEQ ID NO: 3850 - DNA, 21 bp, Homo Sapiens
ccctccccaatcatctttcct

SEQ ID NO: 3851 - DNA, 21 bp, Homo Sapiens
cctccccaatcatctttcctg

SEQ ID NO: 3852 - DNA, 21 bp, Homo Sapiens
ctccccaatcatctttcctgt

SEQ ID NO: 3853 - DNA, 21 bp, Homo Sapiens
tccccaatcatctttcctgtt

SEQ ID NO: 3854 - DNA, 21 bp, Homo Sapiens
ccccaatcatctttcctgttc

SEQ ID NO: 3855 - DNA, 22 bp, Homo Sapiens
ccccgaaggcggtgtatggatt

SEQ ID NO: 3856 - DNA, 22 bp, Homo Sapiens
gaaggcggtgtatggattgggg

SEQ ID NO: 3857 - DNA, 22 bp, Homo Sapiens
aaggcggtgtatggattgggga

SEQ ID NO: 3858 - DNA, 22 bp, Homo Sapiens
aggcggtgtatggattggggag

SEQ ID NO: 3859 - DNA, 22 bp, Homo Sapiens
ggcggtgtatggattggggagt

SEQ ID NO: 3860 - DNA, 22 bp, Homo Sapiens
gcggtgtatggattggggagtc

SEQ ID NO: 3861 - DNA, 22 bp, Homo Sapiens
cggtgtatggattggggagtcc

SEQ ID NO: 3862 - DNA, 22 bp, Homo Sapiens
ggtgtatggattggggagtccc

SEQ ID NO: 3863 - DNA, 22 bp, Homo Sapiens
gtgtatggattggggagtccca

SEQ ID NO: 3864 - DNA, 22 bp, Homo Sapiens
tgtatggattggggagtcccag

SEQ ID NO: 3865 - DNA, 22 bp, Homo Sapiens
gtatggattggggagtcccagc

SEQ ID NO: 3866 - DNA, 22 bp, Homo Sapiens
tatggattggggagtcccagcc

SEQ ID NO: 3867 - DNA, 22 bp, Homo Sapiens
atggattggggagtcccagcct

SEQ ID NO: 3868 - DNA, 22 bp, Homo Sapiens
tggattggggagtcccagcctt

SEQ ID NO: 3869 - DNA, 22 bp, Homo Sapiens
cagccttggggattccccaact

SEQ ID NO: 3870 - DNA, 22 bp, Homo Sapiens
agccttggggattccccaactc

SEQ ID NO: 3871 - DNA, 22 bp, Homo Sapiens
ttggggattccccaactccgca

SEQ ID NO: 3872 - DNA, 22 bp, Homo Sapiens
gggattccccaactccgcagtt

SEQ ID NO: 3873 - DNA, 22 bp, Homo Sapiens
ggattccccaactccgcagttt

SEQ ID NO: 3874 - DNA, 22 bp, Homo Sapiens
gattccccaactccgcagtttc

SEQ ID NO: 3875 - DNA, 22 bp, Homo Sapiens
attccccaactccgcagtttct

SEQ ID NO: 3876 - DNA, 22 bp, Homo Sapiens
ttccccaactccgcagtttctt

SEQ ID NO: 3877 - DNA, 22 bp, Homo Sapiens
tccccaactccgcagtttcttt

SEQ ID NO: 3878 - DNA, 22 bp, Homo Sapiens
ccccaactccgcagtttctttt

SEQ ID NO: 3879 - DNA, 22 bp, Homo Sapiens
cccaactccgcagtttcttttc

SEQ ID NO: 3880 - DNA, 22 bp, Homo Sapiens
ccaactccgcagtttcttttct

SEQ ID NO: 3881 - DNA, 22 bp, Homo Sapiens
caactccgcagtttcttttctc

SEQ ID NO: 3882 - DNA, 22 bp, Homo Sapiens
aactccgcagtttcttttctcc

SEQ ID NO: 3883 - DNA, 22 bp, Homo Sapiens
actccgcagtttcttttctccc

SEQ ID NO: 3884 - DNA, 22 bp, Homo Sapiens
ctccgcagtttcttttctccct

SEQ ID NO: 3885 - DNA, 22 bp, Homo Sapiens
tccgcagtttcttttctccctc

SEQ ID NO: 3886 - DNA, 22 bp, Homo Sapiens
ccgcagtttcttttctccctct

SEQ ID NO: 3887 - DNA, 22 bp, Homo Sapiens
cgcagtttcttttctccctctc

SEQ ID NO: 3888 - DNA, 22 bp, Homo Sapiens
gcagtttcttttctccctctcc

SEQ ID NO: 3889 - DNA, 22 bp, Homo Sapiens
cagtttcttttctccctctccc

SEQ ID NO: 3890 - DNA, 22 bp, Homo Sapiens
agtttcttttctccctctccca

SEQ ID NO: 3891 - DNA, 22 bp, Homo Sapiens
gtttcttttctccctctcccaa

SEQ ID NO: 3892 - DNA, 22 bp, Homo Sapiens
tttcttttctccctctcccaac

SEQ ID NO: 3893 - DNA, 22 bp, Homo Sapiens
ttcttttctccctctcccaacc

SEQ ID NO: 3894 - DNA, 22 bp, Homo Sapiens
tcttttctccctctcccaacct

SEQ ID NO: 3895 - DNA, 22 bp, Homo Sapiens
cttttctccctctcccaaccta

SEQ ID NO: 3896 - DNA, 22 bp, Homo Sapiens
ttttctccctctcccaacctat

SEQ ID NO: 3897 - DNA, 22 bp, Homo Sapiens
accgggactcagattctcccca

SEQ ID NO: 3898 - DNA, 22 bp, Homo Sapiens
cgggactcagattctccccaga

SEQ ID NO: 3899 - DNA, 22 bp, Homo Sapiens
gggactcagattctccccagac

SEQ ID NO: 3900 - DNA, 22 bp, Homo Sapiens
ggactcagattctccccagacg

SEQ ID NO: 3901 - DNA, 22 bp, Homo Sapiens
gactcagattctccccagacgc

SEQ ID NO: 3902 - DNA, 22 bp, Homo Sapiens
actcagattctccccagacgcc

SEQ ID NO: 3903 - DNA, 22 bp, Homo Sapiens
tcagattctccccagacgccga

SEQ ID NO: 3904 - DNA, 22 bp, Homo Sapiens
attctccccagacgccgaggat

SEQ ID NO: 3905 - DNA, 22 bp, Homo Sapiens
ggagtattgggacggggagaca

SEQ ID NO: 3906 - DNA, 22 bp, Homo Sapiens
gagtattgggacggggagacac

SEQ ID NO: 3907 - DNA, 22 bp, Homo Sapiens
agtattgggacggggagacacg

SEQ ID NO: 3908 - DNA, 22 bp, Homo Sapiens
tattgggacggggagacacgga

SEQ ID NO: 3909 - DNA, 22 bp, Homo Sapiens
attgggacggggagacacggaa

SEQ ID NO: 3910 - DNA, 22 bp, Homo Sapiens
ttgggacggggagacacggaaa

SEQ ID NO: 3911 - DNA, 22 bp, Homo Sapiens
gacggggagacacggaaagtga

SEQ ID NO: 3912 - DNA, 22 bp, Homo Sapiens
acggggagacacggaaagtgaa

SEQ ID NO: 3913 - DNA, 22 bp, Homo Sapiens
cggggagacacggaaagtgaag

SEQ ID NO: 3914 - DNA, 22 bp, Homo Sapiens
ggggagacacggaaagtgaagg

SEQ ID NO: 3915 - DNA, 22 bp, Homo Sapiens
ctgcgcggctactacaaccaga

SEQ ID NO: 3916 - DNA, 22 bp, Homo Sapiens
tgcgcggctactacaaccagag

SEQ ID NO: 3917 - DNA, 22 bp, Homo Sapiens
atgtatggctgcgacgtggggt

SEQ ID NO: 3918 - DNA, 22 bp, Homo Sapiens
acggacgcccccaaaacgcata

SEQ ID NO: 3919 - DNA, 22 bp, Homo Sapiens
cggacgcccccaaaacgcatat

SEQ ID NO: 3920 - DNA, 22 bp, Homo Sapiens
ggacgcccccaaaacgcatatg

SEQ ID NO: 3921 - DNA, 22 bp, Homo Sapiens
gacgcccccaaaacgcatatga

SEQ ID NO: 3922 - DNA, 22 bp, Homo Sapiens
acgcccccaaaacgcatatgac

SEQ ID NO: 3923 - DNA, 22 bp, Homo Sapiens
cgcccccaaaacgcatatgact

SEQ ID NO: 3924 - DNA, 22 bp, Homo Sapiens
gcccccaaaacgcatatgactc

SEQ ID NO: 3925 - DNA, 22 bp, Homo Sapiens
cccccaaaacgcatatgactca

SEQ ID NO: 3926 - DNA, 22 bp, Homo Sapiens
ccccaaaacgcatatgactcac

SEQ ID NO: 3927 - DNA, 22 bp, Homo Sapiens
cccaaaacgcatatgactcacc

SEQ ID NO: 3928 - DNA, 22 bp, Homo Sapiens
ccaaaacgcatatgactcacca

SEQ ID NO: 3929 - DNA, 22 bp, Homo Sapiens
caaaacgcatatgactcaccac

SEQ ID NO: 3930 - DNA, 22 bp, Homo Sapiens
aaaacgcatatgactcaccacg

SEQ ID NO: 3931 - DNA, 22 bp, Homo Sapiens
ctgcaggggatggaaccttcca

SEQ ID NO: 3932 - DNA, 22 bp, Homo Sapiens
tgcaggggatggaaccttccag

SEQ ID NO: 3933 - DNA, 22 bp, Homo Sapiens
gcaggggatggaaccttccaga

SEQ ID NO: 3934 - DNA, 22 bp, Homo Sapiens
caggggatggaaccttccagaa

SEQ ID NO: 3935 - DNA, 22 bp, Homo Sapiens
aggggatggaaccttccagaag

SEQ ID NO: 3936 - DNA, 22 bp, Homo Sapiens
ggggatggaaccttccagaagt

SEQ ID NO: 3937 - DNA, 22 bp, Homo Sapiens
aaccttccagaagtgggcggct

SEQ ID NO: 3938 - DNA, 22 bp, Homo Sapiens
atgagggtttgcccaagcccct

SEQ ID NO: 3939 - DNA, 22 bp, Homo Sapiens
accatccccatcgtgggcatca

SEQ ID NO: 3940 - DNA, 22 bp, Homo Sapiens
ccatccccatcgtgggcatcat

SEQ ID NO: 3941 - DNA, 22 bp, Homo Sapiens
catccccatcgtgggcatcatt

SEQ ID NO: 3942 - DNA, 22 bp, Homo Sapiens
atccccatcgtgggcatcattg

SEQ ID NO: 3943 - DNA, 22 bp, Homo Sapiens
tccccatcgtgggcatcattgc

SEQ ID NO: 3944 - DNA, 22 bp, Homo Sapiens
ccccatcgtgggcatcattgct

SEQ ID NO: 3945 - DNA, 22 bp, Homo Sapiens
gaggaagagctcagatagaaaa

SEQ ID NO: 3946 - DNA, 22 bp, Homo Sapiens
aggaagagctcagatagaaaag

SEQ ID NO: 3947 - DNA, 22 bp, Homo Sapiens
ggaagagctcagatagaaaagg

SEQ ID NO: 3948 - DNA, 22 bp, Homo Sapiens
gaagagctcagatagaaaagga

SEQ ID NO: 3949 - DNA, 22 bp, Homo Sapiens
aagagctcagatagaaaaggag

SEQ ID NO: 3950 - DNA, 22 bp, Homo Sapiens
agagctcagatagaaaaggagg

SEQ ID NO: 3951 - DNA, 22 bp, Homo Sapiens
gagctcagatagaaaaggaggg

SEQ ID NO: 3952 - DNA, 22 bp, Homo Sapiens
agctcagatagaaaaggaggga

SEQ ID NO: 3953 - DNA, 22 bp, Homo Sapiens
gctcagatagaaaaggagggag

SEQ ID NO: 3954 - DNA, 22 bp, Homo Sapiens
ctcagatagaaaaggagggagc

SEQ ID NO: 3955 - DNA, 22 bp, Homo Sapiens
tcagatagaaaaggagggagct

SEQ ID NO: 3956 - DNA, 22 bp, Homo Sapiens
cagatagaaaaggagggagcta

SEQ ID NO: 3957 - DNA, 22 bp, Homo Sapiens
agatagaaaaggagggagctac

SEQ ID NO: 3958 - DNA, 22 bp, Homo Sapiens
gatagaaaaggagggagctact

SEQ ID NO: 3959 - DNA, 22 bp, Homo Sapiens
atagaaaaggagggagctactc

SEQ ID NO: 3960 - DNA, 22 bp, Homo Sapiens
tagaaaaggagggagctactct

SEQ ID NO: 3961 - DNA, 22 bp, Homo Sapiens
agaaaaggagggagctactctc

SEQ ID NO: 3962 - DNA, 22 bp, Homo Sapiens
gaaaaggagggagctactctca

SEQ ID NO: 3963 - DNA, 22 bp, Homo Sapiens
aaaaggagggagctactctcag

SEQ ID NO: 3964 - DNA, 22 bp, Homo Sapiens
ggcataatgtgaggaggtgggg

SEQ ID NO: 3965 - DNA, 22 bp, Homo Sapiens
gcataatgtgaggaggtgggga

SEQ ID NO: 3966 - DNA, 22 bp, Homo Sapiens
cataatgtgaggaggtggggag

SEQ ID NO: 3967 - DNA, 22 bp, Homo Sapiens
ataatgtgaggaggtggggaga

SEQ ID NO: 3968 - DNA, 22 bp, Homo Sapiens
taatgtgaggaggtggggagac

SEQ ID NO: 3969 - DNA, 22 bp, Homo Sapiens
aatgtgaggaggtggggagacc

SEQ ID NO: 3970 - DNA, 22 bp, Homo Sapiens
atgtgaggaggtggggagacca

SEQ ID NO: 3971 - DNA, 22 bp, Homo Sapiens
tgacctgtgctccctccccaat

SEQ ID NO: 3972 - DNA, 22 bp, Homo Sapiens
acctgtgctccctccccaatca

SEQ ID NO: 3973 - DNA, 22 bp, Homo Sapiens
cctgtgctccctccccaatcat

SEQ ID NO: 3974 - DNA, 22 bp, Homo Sapiens
ctgtgctccctccccaatcatc

SEQ ID NO: 3975 - DNA, 22 bp, Homo Sapiens
tgtgctccctccccaatcatct

SEQ ID NO: 3976 - DNA, 22 bp, Homo Sapiens
gtgctccctccccaatcatctt

SEQ ID NO: 3977 - DNA, 22 bp, Homo Sapiens
tgctccctccccaatcatcttt

SEQ ID NO: 3978 - DNA, 22 bp, Homo Sapiens
gctccctccccaatcatctttc

SEQ ID NO: 3979 - DNA, 22 bp, Homo Sapiens
ctccctccccaatcatctttcc

SEQ ID NO: 3980 - DNA, 22 bp, Homo Sapiens
tccctccccaatcatctttcct

SEQ ID NO: 3981 - DNA, 22 bp, Homo Sapiens
ccctccccaatcatctttcctg

SEQ ID NO: 3982 - DNA, 22 bp, Homo Sapiens
cctccccaatcatctttcctgt

SEQ ID NO: 3983 - DNA, 22 bp, Homo Sapiens
ctccccaatcatctttcctgtt

SEQ ID NO: 3984 - DNA, 22 bp, Homo Sapiens
tccccaatcatctttcctgttc

SEQ ID NO: 3985 - DNA, 22 bp, Homo Sapiens
ccccaatcatctttcctgttcc

SEQ ID NO: 3986 - DNA, 22 bp, Homo Sapiens
ttcctgttccagagaggtgggg

SEQ ID NO: 3987 - DNA, 22 bp, Homo Sapiens
tgttccagagaggtggggctga

SEQ ID NO: 3988 - DNA, 22 bp, Homo Sapiens
tggggctgaggtgtctccatct

SEQ ID NO: 3989 - DNA, 20 bp, Homo Sapiens
ttcttccttccctattaaaa

SEQ ID NO: 3990 - DNA, 22 bp, Homo Sapiens
acttcttccttccctattaaaa

SEQ ID NO: 3991 - DNA, 18 bp, Homo Sapiens
cagaagcagaggggtcag

SEQ ID NO: 3992 - DNA, 18 bp, Homo Sapiens
aagcagaggggtcagggc

SEQ ID NO: 3993 - DNA, 18 bp, Homo Sapiens
agcagaggggtcagggcg

SEQ ID NO: 3994 - DNA, 18 bp, Homo Sapiens
gcagaggggtcagggcga

SEQ ID NO: 3995 - DNA, 18 bp, Homo Sapiens
cagaggggtcagggcgaa

SEQ ID NO: 3996 - DNA, 18 bp, Homo Sapiens
agaggggtcagggcgaag

SEQ ID NO: 3997 - DNA, 18 bp, Homo Sapiens
gaggggtcagggcgaagt

SEQ ID NO: 3998 - DNA, 18 bp, Homo Sapiens
aggggtcagggcgaagtc

SEQ ID NO: 3999 - DNA, 18 bp, Homo Sapiens
ggggtcagggcgaagtcc

SEQ ID NO: 4000 - DNA, 18 bp, Homo Sapiens
gggtcagggcgaagtccc

SEQ ID NO: 4001 - DNA, 18 bp, Homo Sapiens
ggtcagggcgaagtccca

SEQ ID NO: 4002 - DNA, 18 bp, Homo Sapiens
gtcagggcgaagtcccag

SEQ ID NO: 4003 - DNA, 18 bp, Homo Sapiens
tcagggcgaagtcccagg

SEQ ID NO: 4004 - DNA, 18 bp, Homo Sapiens
cagggcgaagtcccaggg

SEQ ID NO: 4005 - DNA, 18 bp, Homo Sapiens
agggcgaagtcccagggc

SEQ ID NO: 4006 - DNA, 18 bp, Homo Sapiens
gggcgaagtcccagggcc

SEQ ID NO: 4007 - DNA, 18 bp, Homo Sapiens
ggcgaagtcccagggccc

SEQ ID NO: 4008 - DNA, 18 bp, Homo Sapiens
gcgaagtcccagggcccc

SEQ ID NO: 4009 - DNA, 18 bp, Homo Sapiens
cgaagtcccagggcccca

SEQ ID NO: 4010 - DNA, 18 bp, Homo Sapiens
gaagtcccagggccccag

SEQ ID NO: 4011 - DNA, 18 bp, Homo Sapiens
aagtcccagggccccagg

SEQ ID NO: 4012 - DNA, 18 bp, Homo Sapiens
agtcccagggccccaggc

SEQ ID NO: 4013 - DNA, 18 bp, Homo Sapiens
gtcccagggccccaggcg

SEQ ID NO: 4014 - DNA, 18 bp, Homo Sapiens
tcccagggccccaggcgt

SEQ ID NO: 4015 - DNA, 18 bp, Homo Sapiens
cccagggccccaggcgtg

SEQ ID NO: 4016 - DNA, 18 bp, Homo Sapiens
ccagggccccaggcgtgg

SEQ ID NO: 4017 - DNA, 18 bp, Homo Sapiens
cagggccccaggcgtggc

SEQ ID NO: 4018 - DNA, 18 bp, Homo Sapiens
agggccccaggcgtggct

SEQ ID NO: 4019 - DNA, 18 bp, Homo Sapiens
gggccccaggcgtggctc

SEQ ID NO: 4020 - DNA, 18 bp, Homo Sapiens
ggccccaggcgtggctct

SEQ ID NO: 4021 - DNA, 18 bp, Homo Sapiens
gccccaggcgtggctctc

SEQ ID NO: 4022 - DNA, 18 bp, Homo Sapiens
ccccaggcgtggctctca

SEQ ID NO: 4023 - DNA, 18 bp, Homo Sapiens
cccaggcgtggctctcag

SEQ ID NO: 4024 - DNA, 18 bp, Homo Sapiens
ccaggcgtggctctcagg

SEQ ID NO: 4025 - DNA, 18 bp, Homo Sapiens
caggcgtggctctcaggg

SEQ ID NO: 4026 - DNA, 18 bp, Homo Sapiens
aggcgtggctctcagggt

SEQ ID NO: 4027 - DNA, 18 bp, Homo Sapiens
ggcgtggctctcagggtc

SEQ ID NO: 4028 - DNA, 18 bp, Homo Sapiens
gcgtggctctcagggtct

SEQ ID NO: 4029 - DNA, 18 bp, Homo Sapiens
cgtggctctcagggtctc

SEQ ID NO: 4030 - DNA, 18 bp, Homo Sapiens
gtggctctcagggtctca

SEQ ID NO: 4031 - DNA, 18 bp, Homo Sapiens
tggctctcagggtctcag

SEQ ID NO: 4032 - DNA, 18 bp, Homo Sapiens
ggctctcagggtctcagg

SEQ ID NO: 4033 - DNA, 18 bp, Homo Sapiens
gctctcagggtctcaggc

SEQ ID NO: 4034 - DNA, 18 bp, Homo Sapiens
ctctcagggtctcaggcc

SEQ ID NO: 4035 - DNA, 18 bp, Homo Sapiens
tctcagggtctcaggccc

SEQ ID NO: 4036 - DNA, 18 bp, Homo Sapiens
ctcagggtctcaggcccc

SEQ ID NO: 4037 - DNA, 18 bp, Homo Sapiens
tcagggtctcaggccccg

SEQ ID NO: 4038 - DNA, 18 bp, Homo Sapiens
cagggtctcaggccccga

SEQ ID NO: 4039 - DNA, 18 bp, Homo Sapiens
agggtctcaggccccgaa

SEQ ID NO: 4040 - DNA, 18 bp, Homo Sapiens
gggtctcaggccccgaag

SEQ ID NO: 4041 - DNA, 18 bp, Homo Sapiens
ggtctcaggccccgaagg

SEQ ID NO: 4042 - DNA, 18 bp, Homo Sapiens
gtctcaggccccgaaggc

SEQ ID NO: 4043 - DNA, 18 bp, Homo Sapiens
tctcaggccccgaaggcg

SEQ ID NO: 4044 - DNA, 18 bp, Homo Sapiens
ctcaggccccgaaggcgg

SEQ ID NO: 4045 - DNA, 18 bp, Homo Sapiens
tcaggccccgaaggcggt

SEQ ID NO: 4046 - DNA, 18 bp, Homo Sapiens
caggccccgaaggcggtg

SEQ ID NO: 4047 - DNA, 18 bp, Homo Sapiens
aggccccgaaggcggtgt

SEQ ID NO: 4048 - DNA, 18 bp, Homo Sapiens
ggccccgaaggcggtgta

SEQ ID NO: 4049 - DNA, 18 bp, Homo Sapiens
gccccgaaggcggtgtat

SEQ ID NO: 4050 - DNA, 18 bp, Homo Sapiens
ccccgaaggcggtgtatg

SEQ ID NO: 4051 - DNA, 18 bp, Homo Sapiens
cccgaaggcggtgtatgg

SEQ ID NO: 4052 - DNA, 18 bp, Homo Sapiens
ccgaaggcggtgtatgga

SEQ ID NO: 4053 - DNA, 18 bp, Homo Sapiens
ggcggtgtatggattggg

SEQ ID NO: 4054 - DNA, 18 bp, Homo Sapiens
attggggagtcccagcct

SEQ ID NO: 4055 - DNA, 18 bp, Homo Sapiens
ttggggagtcccagcctt

SEQ ID NO: 4056 - DNA, 18 bp, Homo Sapiens
tcccagccttggggattc

SEQ ID NO: 4057 - DNA, 18 bp, Homo Sapiens
cccagccttggggattcc

SEQ ID NO: 4058 - DNA, 18 bp, Homo Sapiens
ccagccttggggattccc

SEQ ID NO: 4059 - DNA, 18 bp, Homo Sapiens
cagccttggggattcccc

SEQ ID NO: 4060 - DNA, 18 bp, Homo Sapiens
agccttggggattcccca

SEQ ID NO: 4061 - DNA, 18 bp, Homo Sapiens
gccttggggattccccaa

SEQ ID NO: 4062 - DNA, 18 bp, Homo Sapiens
ccttggggattccccaac

SEQ ID NO: 4063 - DNA, 18 bp, Homo Sapiens
tggggattccccaactcc

SEQ ID NO: 4064 - DNA, 18 bp, Homo Sapiens
ggggattccccaactccg

SEQ ID NO: 4065 - DNA, 18 bp, Homo Sapiens
gggattccccaactccgc

SEQ ID NO: 4066 - DNA, 18 bp, Homo Sapiens
ggattccccaactccgca

SEQ ID NO: 4067 - DNA, 18 bp, Homo Sapiens
gattccccaactccgcag

SEQ ID NO: 4068 - DNA, 18 bp, Homo Sapiens
ccccaactccgcagtttc

SEQ ID NO: 4069 - DNA, 18 bp, Homo Sapiens
cctggatactcacgacgc

SEQ ID NO: 4070 - DNA, 18 bp, Homo Sapiens
ctggatactcacgacgcg

SEQ ID NO: 4071 - DNA, 18 bp, Homo Sapiens
tggatactcacgacgcgg

SEQ ID NO: 4072 - DNA, 18 bp, Homo Sapiens
ggatactcacgacgcgga

SEQ ID NO: 4073 - DNA, 18 bp, Homo Sapiens
gatactcacgacgcggac

SEQ ID NO: 4074 - DNA, 18 bp, Homo Sapiens
atactcacgacgcggacc

SEQ ID NO: 4075 - DNA, 18 bp, Homo Sapiens
tactcacgacgcggaccc

SEQ ID NO: 4076 - DNA, 18 bp, Homo Sapiens
actcacgacgcggaccca

SEQ ID NO: 4077 - DNA, 18 bp, Homo Sapiens
ctcacgacgcggacccag

SEQ ID NO: 4078 - DNA, 18 bp, Homo Sapiens
tcacgacgcggacccagt

SEQ ID NO: 4079 - DNA, 18 bp, Homo Sapiens
cacgacgcggacccagtt

SEQ ID NO: 4080 - DNA, 18 bp, Homo Sapiens
acgacgcggacccagttc

SEQ ID NO: 4081 - DNA, 18 bp, Homo Sapiens
cgacgcggacccagttct

SEQ ID NO: 4082 - DNA, 18 bp, Homo Sapiens
gacgcggacccagttctc

SEQ ID NO: 4083 - DNA, 18 bp, Homo Sapiens
acgcggacccagttctca

SEQ ID NO: 4084 - DNA, 18 bp, Homo Sapiens
cgcggacccagttctcac

SEQ ID NO: 4085 - DNA, 18 bp, Homo Sapiens
gcggacccagttctcact

SEQ ID NO: 4086 - DNA, 18 bp, Homo Sapiens
cggacccagttctcactc

SEQ ID NO: 4087 - DNA, 18 bp, Homo Sapiens
ggacccagttctcactcc

SEQ ID NO: 4088 - DNA, 18 bp, Homo Sapiens
gacccagttctcactccc

SEQ ID NO: 4089 - DNA, 18 bp, Homo Sapiens
cactcccattgggtgtcg

SEQ ID NO: 4090 - DNA, 18 bp, Homo Sapiens
actcccattgggtgtcgg

SEQ ID NO: 4091 - DNA, 18 bp, Homo Sapiens
ctcccattgggtgtcggg

SEQ ID NO: 4092 - DNA, 18 bp, Homo Sapiens
tcccattgggtgtcgggt

SEQ ID NO: 4093 - DNA, 18 bp, Homo Sapiens
cccattgggtgtcgggtt

SEQ ID NO: 4094 - DNA, 18 bp, Homo Sapiens
tgggtgtcgggtttccag

SEQ ID NO: 4095 - DNA, 18 bp, Homo Sapiens
gggtgtcgggtttccaga

SEQ ID NO: 4096 - DNA, 18 bp, Homo Sapiens
ggtgtcgggtttccagag

SEQ ID NO: 4097 - DNA, 18 bp, Homo Sapiens
cgggtttccagagaagcc

SEQ ID NO: 4098 - DNA, 18 bp, Homo Sapiens
gccaatcagtgtcgtcgc

SEQ ID NO: 4099 - DNA, 18 bp, Homo Sapiens
ccaatcagtgtcgtcgcg

SEQ ID NO: 4100 - DNA, 18 bp, Homo Sapiens
caatcagtgtcgtcgcgg

SEQ ID NO: 4101 - DNA, 18 bp, Homo Sapiens
atcagtgtcgtcgcggtc

SEQ ID NO: 4102 - DNA, 18 bp, Homo Sapiens
tcagtgtcgtcgcggtcg

SEQ ID NO: 4103 - DNA, 18 bp, Homo Sapiens
cagtgtcgtcgcggtcgc

SEQ ID NO: 4104 - DNA, 18 bp, Homo Sapiens
agtgtcgtcgcggtcgcg

SEQ ID NO: 4105 - DNA, 18 bp, Homo Sapiens
gtgtcgtcgcggtcgcgg

SEQ ID NO: 4106 - DNA, 18 bp, Homo Sapiens
tgtcgtcgcggtcgcggt

SEQ ID NO: 4107 - DNA, 18 bp, Homo Sapiens
gtcgtcgcggtcgcggtt

SEQ ID NO: 4108 - DNA, 18 bp, Homo Sapiens
tcgtcgcggtcgcggttc

SEQ ID NO: 4109 - DNA, 18 bp, Homo Sapiens
cgtcgcggtcgcggttct

SEQ ID NO: 4110 - DNA, 18 bp, Homo Sapiens
gtcgcggtcgcggttcta

SEQ ID NO: 4111 - DNA, 18 bp, Homo Sapiens
tcgcggtcgcggttctaa

SEQ ID NO: 4112 - DNA, 18 bp, Homo Sapiens
cgcggtcgcggttctaaa

SEQ ID NO: 4113 - DNA, 18 bp, Homo Sapiens
gcggtcgcggttctaaag

SEQ ID NO: 4114 - DNA, 18 bp, Homo Sapiens
cgcggttctaaagtccgc

SEQ ID NO: 4115 - DNA, 18 bp, Homo Sapiens
ctaaagtccgcacgcacc

SEQ ID NO: 4116 - DNA, 18 bp, Homo Sapiens
taaagtccgcacgcaccc

SEQ ID NO: 4117 - DNA, 18 bp, Homo Sapiens
aaagtccgcacgcaccca

SEQ ID NO: 4118 - DNA, 18 bp, Homo Sapiens
aagtccgcacgcacccac

SEQ ID NO: 4119 - DNA, 18 bp, Homo Sapiens
agtccgcacgcacccacc

SEQ ID NO: 4120 - DNA, 18 bp, Homo Sapiens
gtccgcacgcacccaccg

SEQ ID NO: 4121 - DNA, 18 bp, Homo Sapiens
tccgcacgcacccaccgg

SEQ ID NO: 4122 - DNA, 18 bp, Homo Sapiens
ccgcacgcacccaccggg

SEQ ID NO: 4123 - DNA, 18 bp, Homo Sapiens
cgcacgcacccaccggga

SEQ ID NO: 4124 - DNA, 18 bp, Homo Sapiens
gcacgcacccaccgggac

SEQ ID NO: 4125 - DNA, 18 bp, Homo Sapiens
cacgcacccaccgggact

SEQ ID NO: 4126 - DNA, 18 bp, Homo Sapiens
acgcacccaccgggactc

SEQ ID NO: 4127 - DNA, 18 bp, Homo Sapiens
cgcacccaccgggactca

SEQ ID NO: 4128 - DNA, 18 bp, Homo Sapiens
gcacccaccgggactcag

SEQ ID NO: 4129 - DNA, 18 bp, Homo Sapiens
cacccaccgggactcaga

SEQ ID NO: 4130 - DNA, 18 bp, Homo Sapiens
acccaccgggactcagat

SEQ ID NO: 4131 - DNA, 18 bp, Homo Sapiens
cccaccgggactcagatt

SEQ ID NO: 4132 - DNA, 18 bp, Homo Sapiens
ccaccgggactcagattc

SEQ ID NO: 4133 - DNA, 18 bp, Homo Sapiens
ccgggactcagattctcc

SEQ ID NO: 4134 - DNA, 18 bp, Homo Sapiens
cgggactcagattctccc

SEQ ID NO: 4135 - DNA, 18 bp, Homo Sapiens
gggactcagattctcccc

SEQ ID NO: 4136 - DNA, 18 bp, Homo Sapiens
cagattctccccagacgc

SEQ ID NO: 4137 - DNA, 18 bp, Homo Sapiens
agattctccccagacgcc

SEQ ID NO: 4138 - DNA, 18 bp, Homo Sapiens
gattctccccagacgccg

SEQ ID NO: 4139 - DNA, 18 bp, Homo Sapiens
attctccccagacgccga

SEQ ID NO: 4140 - DNA, 18 bp, Homo Sapiens
ttctccccagacgccgag

SEQ ID NO: 4141 - DNA, 18 bp, Homo Sapiens
tctccccagacgccgagg

SEQ ID NO: 4142 - DNA, 18 bp, Homo Sapiens
ctccccagacgccgagga

SEQ ID NO: 4143 - DNA, 18 bp, Homo Sapiens
tccccagacgccgaggat

SEQ ID NO: 4144 - DNA, 18 bp, Homo Sapiens
ccccagacgccgaggatg

SEQ ID NO: 4145 - DNA, 18 bp, Homo Sapiens
cccagacgccgaggatgg

SEQ ID NO: 4146 - DNA, 18 bp, Homo Sapiens
ccagacgccgaggatggc

SEQ ID NO: 4147 - DNA, 18 bp, Homo Sapiens
cagacgccgaggatggcc

SEQ ID NO: 4148 - DNA, 18 bp, Homo Sapiens
agacgccgaggatggccg

SEQ ID NO: 4149 - DNA, 18 bp, Homo Sapiens
gacgccgaggatggccgt

SEQ ID NO: 4150 - DNA, 18 bp, Homo Sapiens
acgccgaggatggccgtc

SEQ ID NO: 4151 - DNA, 18 bp, Homo Sapiens
cgccgaggatggccgtca

SEQ ID NO: 4152 - DNA, 18 bp, Homo Sapiens
gccgaggatggccgtcat

SEQ ID NO: 4153 - DNA, 18 bp, Homo Sapiens
ccgaggatggccgtcatg

SEQ ID NO: 4154 - DNA, 18 bp, Homo Sapiens
cgaggatggccgtcatgg

SEQ ID NO: 4155 - DNA, 18 bp, Homo Sapiens
gaggatggccgtcatggc

SEQ ID NO: 4156 - DNA, 18 bp, Homo Sapiens
aggatggccgtcatggcg

SEQ ID NO: 4157 - DNA, 18 bp, Homo Sapiens
ggatggccgtcatggcgc

SEQ ID NO: 4158 - DNA, 18 bp, Homo Sapiens
gatggccgtcatggcgcc

SEQ ID NO: 4159 - DNA, 18 bp, Homo Sapiens
atggccgtcatggcgccc

SEQ ID NO: 4160 - DNA, 18 bp, Homo Sapiens
tggccgtcatggcgcccc

SEQ ID NO: 4161 - DNA, 18 bp, Homo Sapiens
ggccgtcatggcgccccg

SEQ ID NO: 4162 - DNA, 18 bp, Homo Sapiens
gccgtcatggcgccccga

SEQ ID NO: 4163 - DNA, 18 bp, Homo Sapiens
ccgtcatggcgccccgaa

SEQ ID NO: 4164 - DNA, 18 bp, Homo Sapiens
cgtcatggcgccccgaac

SEQ ID NO: 4165 - DNA, 18 bp, Homo Sapiens
gtcatggcgccccgaacc

SEQ ID NO: 4166 - DNA, 18 bp, Homo Sapiens
tcatggcgccccgaaccc

SEQ ID NO: 4167 - DNA, 18 bp, Homo Sapiens
catggcgccccgaaccct

SEQ ID NO: 4168 - DNA, 18 bp, Homo Sapiens
atggcgccccgaaccctc

SEQ ID NO: 4169 - DNA, 18 bp, Homo Sapiens
tggcgccccgaaccctcg

SEQ ID NO: 4170 - DNA, 18 bp, Homo Sapiens
ggcgccccgaaccctcgt

SEQ ID NO: 4171 - DNA, 18 bp, Homo Sapiens
gcgccccgaaccctcgtc

SEQ ID NO: 4172 - DNA, 18 bp, Homo Sapiens
cgccccgaaccctcgtcc

SEQ ID NO: 4173 - DNA, 18 bp, Homo Sapiens
gccccgaaccctcgtcct

SEQ ID NO: 4174 - DNA, 18 bp, Homo Sapiens
ccccgaaccctcgtcctg

SEQ ID NO: 4175 - DNA, 18 bp, Homo Sapiens
cccgaaccctcgtcctgc

SEQ ID NO: 4176 - DNA, 18 bp, Homo Sapiens
ccgaaccctcgtcctgct

SEQ ID NO: 4177 - DNA, 18 bp, Homo Sapiens
cgaaccctcgtcctgcta

SEQ ID NO: 4178 - DNA, 18 bp, Homo Sapiens
gaaccctcgtcctgctac

SEQ ID NO: 4179 - DNA, 18 bp, Homo Sapiens
accctcgtcctgctactc

SEQ ID NO: 4180 - DNA, 18 bp, Homo Sapiens
ccctcgtcctgctactct

SEQ ID NO: 4181 - DNA, 18 bp, Homo Sapiens
cctcgtcctgctactctc

SEQ ID NO: 4182 - DNA, 18 bp, Homo Sapiens
ctcgtcctgctactctcg

SEQ ID NO: 4183 - DNA, 18 bp, Homo Sapiens
tcgtcctgctactctcgg

SEQ ID NO: 4184 - DNA, 18 bp, Homo Sapiens
cgtcctgctactctcggg

SEQ ID NO: 4185 - DNA, 18 bp, Homo Sapiens
gtcctgctactctcgggg

SEQ ID NO: 4186 - DNA, 18 bp, Homo Sapiens
tcctgctactctcggggg

SEQ ID NO: 4187 - DNA, 18 bp, Homo Sapiens
cctgctactctcgggggc

SEQ ID NO: 4188 - DNA, 18 bp, Homo Sapiens
ctgctactctcgggggct

SEQ ID NO: 4189 - DNA, 18 bp, Homo Sapiens
tgctactctcgggggctc

SEQ ID NO: 4190 - DNA, 18 bp, Homo Sapiens
gctactctcgggggctct

SEQ ID NO: 4191 - DNA, 18 bp, Homo Sapiens
ctactctcgggggctctg

SEQ ID NO: 4192 - DNA, 18 bp, Homo Sapiens
tactctcgggggctctgg

SEQ ID NO: 4193 - DNA, 18 bp, Homo Sapiens
actctcgggggctctggc

SEQ ID NO: 4194 - DNA, 18 bp, Homo Sapiens
ctctcgggggctctggcc

SEQ ID NO: 4195 - DNA, 18 bp, Homo Sapiens
tctcgggggctctggccc

SEQ ID NO: 4196 - DNA, 18 bp, Homo Sapiens
ctcgggggctctggccct

SEQ ID NO: 4197 - DNA, 18 bp, Homo Sapiens
tcgggggctctggccctg

SEQ ID NO: 4198 - DNA, 18 bp, Homo Sapiens
cgggggctctggccctga

SEQ ID NO: 4199 - DNA, 18 bp, Homo Sapiens
gggggctctggccctgac

SEQ ID NO: 4200 - DNA, 18 bp, Homo Sapiens
ggggctctggccctgacc

SEQ ID NO: 4201 - DNA, 18 bp, Homo Sapiens
gggctctggccctgaccc

SEQ ID NO: 4202 - DNA, 18 bp, Homo Sapiens
ggctctggccctgaccca

SEQ ID NO: 4203 - DNA, 18 bp, Homo Sapiens
gctctggccctgacccag

SEQ ID NO: 4204 - DNA, 18 bp, Homo Sapiens
ctctggccctgacccaga

SEQ ID NO: 4205 - DNA, 18 bp, Homo Sapiens
tctggccctgacccagac

SEQ ID NO: 4206 - DNA, 18 bp, Homo Sapiens
ctggccctgacccagacc

SEQ ID NO: 4207 - DNA, 18 bp, Homo Sapiens
tggccctgacccagacct

SEQ ID NO: 4208 - DNA, 18 bp, Homo Sapiens
ggccctgacccagacctg

SEQ ID NO: 4209 - DNA, 18 bp, Homo Sapiens
gccctgacccagacctgg

SEQ ID NO: 4210 - DNA, 18 bp, Homo Sapiens
ccctgacccagacctggg

SEQ ID NO: 4211 - DNA, 18 bp, Homo Sapiens
cctgacccagacctgggc

SEQ ID NO: 4212 - DNA, 18 bp, Homo Sapiens
ctgacccagacctgggcg

SEQ ID NO: 4213 - DNA, 18 bp, Homo Sapiens
tgacccagacctgggcgg

SEQ ID NO: 4214 - DNA, 18 bp, Homo Sapiens
gacccagacctgggcggg

SEQ ID NO: 4215 - DNA, 18 bp, Homo Sapiens
acccagacctgggcgggc

SEQ ID NO: 4216 - DNA, 18 bp, Homo Sapiens
cccagacctgggcgggct

SEQ ID NO: 4217 - DNA, 18 bp, Homo Sapiens
ccagacctgggcgggctc

SEQ ID NO: 4218 - DNA, 18 bp, Homo Sapiens
cagacctgggcgggctct

SEQ ID NO: 4219 - DNA, 18 bp, Homo Sapiens
agacctgggcgggctctc

SEQ ID NO: 4220 - DNA, 18 bp, Homo Sapiens
gacctgggcgggctctca

SEQ ID NO: 4221 - DNA, 18 bp, Homo Sapiens
acctgggcgggctctcac

SEQ ID NO: 4222 - DNA, 18 bp, Homo Sapiens
cctgggcgggctctcact

SEQ ID NO: 4223 - DNA, 18 bp, Homo Sapiens
ctgggcgggctctcactc

SEQ ID NO: 4224 - DNA, 18 bp, Homo Sapiens
tgggcgggctctcactcc

SEQ ID NO: 4225 - DNA, 18 bp, Homo Sapiens
gggcgggctctcactcca

SEQ ID NO: 4226 - DNA, 18 bp, Homo Sapiens
ggcgggctctcactccat

SEQ ID NO: 4227 - DNA, 18 bp, Homo Sapiens
gcgggctctcactccatg

SEQ ID NO: 4228 - DNA, 18 bp, Homo Sapiens
cgggctctcactccatga

SEQ ID NO: 4229 - DNA, 18 bp, Homo Sapiens
gggctctcactccatgag

SEQ ID NO: 4230 - DNA, 18 bp, Homo Sapiens
ggctctcactccatgagg

SEQ ID NO: 4231 - DNA, 18 bp, Homo Sapiens
cttcacatccgtgtcccg

SEQ ID NO: 4232 - DNA, 18 bp, Homo Sapiens
ttcacatccgtgtcccgg

SEQ ID NO: 4233 - DNA, 18 bp, Homo Sapiens
tcacatccgtgtcccggc

SEQ ID NO: 4234 - DNA, 18 bp, Homo Sapiens
cacatccgtgtcccggcc

SEQ ID NO: 4235 - DNA, 18 bp, Homo Sapiens
acatccgtgtcccggccc

SEQ ID NO: 4236 - DNA, 18 bp, Homo Sapiens
catccgtgtcccggcccg

SEQ ID NO: 4237 - DNA, 18 bp, Homo Sapiens
atccgtgtcccggcccgg

SEQ ID NO: 4238 - DNA, 18 bp, Homo Sapiens
tccgtgtcccggcccggc

SEQ ID NO: 4239 - DNA, 18 bp, Homo Sapiens
ccgtgtcccggcccggcc

SEQ ID NO: 4240 - DNA, 18 bp, Homo Sapiens
cgtgtcccggcccggccg

SEQ ID NO: 4241 - DNA, 18 bp, Homo Sapiens
gtgtcccggcccggccgc

SEQ ID NO: 4242 - DNA, 18 bp, Homo Sapiens
tgtcccggcccggccgcg

SEQ ID NO: 4243 - DNA, 18 bp, Homo Sapiens
gtcccggcccggccgcgg

SEQ ID NO: 4244 - DNA, 18 bp, Homo Sapiens
tcccggcccggccgcggg

SEQ ID NO: 4245 - DNA, 18 bp, Homo Sapiens
cccggcccggccgcgggg

SEQ ID NO: 4246 - DNA, 18 bp, Homo Sapiens
ccggcccggccgcgggga

SEQ ID NO: 4247 - DNA, 18 bp, Homo Sapiens
cggcccggccgcggggag

SEQ ID NO: 4248 - DNA, 18 bp, Homo Sapiens
ggcccggccgcggggagc

SEQ ID NO: 4249 - DNA, 18 bp, Homo Sapiens
gcccggccgcggggagcc

SEQ ID NO: 4250 - DNA, 18 bp, Homo Sapiens
cccggccgcggggagccc

SEQ ID NO: 4251 - DNA, 18 bp, Homo Sapiens
ccggccgcggggagcccc

SEQ ID NO: 4252 - DNA, 18 bp, Homo Sapiens
cggccgcggggagccccg

SEQ ID NO: 4253 - DNA, 18 bp, Homo Sapiens
ggccgcggggagccccgc

SEQ ID NO: 4254 - DNA, 18 bp, Homo Sapiens
gccgcggggagccccgct

SEQ ID NO: 4255 - DNA, 18 bp, Homo Sapiens
ccgcggggagccccgctt

SEQ ID NO: 4256 - DNA, 18 bp, Homo Sapiens
cgcggggagccccgcttc

SEQ ID NO: 4257 - DNA, 18 bp, Homo Sapiens
gcggggagccccgcttca

SEQ ID NO: 4258 - DNA, 18 bp, Homo Sapiens
cggggagccccgcttcat

SEQ ID NO: 4259 - DNA, 18 bp, Homo Sapiens
ggggagccccgcttcatc

SEQ ID NO: 4260 - DNA, 18 bp, Homo Sapiens
gggagccccgcttcatcg

SEQ ID NO: 4261 - DNA, 18 bp, Homo Sapiens
ggagccccgcttcatcgc

SEQ ID NO: 4262 - DNA, 18 bp, Homo Sapiens
gagccccgcttcatcgca

SEQ ID NO: 4263 - DNA, 18 bp, Homo Sapiens
agccccgcttcatcgcag

SEQ ID NO: 4264 - DNA, 18 bp, Homo Sapiens
gccccgcttcatcgcagt

SEQ ID NO: 4265 - DNA, 18 bp, Homo Sapiens
ccccgcttcatcgcagtg

SEQ ID NO: 4266 - DNA, 18 bp, Homo Sapiens
cccgcttcatcgcagtgg

SEQ ID NO: 4267 - DNA, 18 bp, Homo Sapiens
ccgcttcatcgcagtggg

SEQ ID NO: 4268 - DNA, 18 bp, Homo Sapiens
cgcttcatcgcagtgggc

SEQ ID NO: 4269 - DNA, 18 bp, Homo Sapiens
gcttcatcgcagtgggct

SEQ ID NO: 4270 - DNA, 18 bp, Homo Sapiens
tcatcgcagtgggctacg

SEQ ID NO: 4271 - DNA, 18 bp, Homo Sapiens
catcgcagtgggctacgt

SEQ ID NO: 4272 - DNA, 18 bp, Homo Sapiens
atcgcagtgggctacgtg

SEQ ID NO: 4273 - DNA, 18 bp, Homo Sapiens
tcgcagtgggctacgtgg

SEQ ID NO: 4274 - DNA, 18 bp, Homo Sapiens
cgcagtgggctacgtgga

SEQ ID NO: 4275 - DNA, 18 bp, Homo Sapiens
gcagtgggctacgtggac

SEQ ID NO: 4276 - DNA, 18 bp, Homo Sapiens
cagtgggctacgtggacg

SEQ ID NO: 4277 - DNA, 18 bp, Homo Sapiens
agtgggctacgtggacga

SEQ ID NO: 4278 - DNA, 18 bp, Homo Sapiens
gtgggctacgtggacgac

SEQ ID NO: 4279 - DNA, 18 bp, Homo Sapiens
tgggctacgtggacgaca

SEQ ID NO: 4280 - DNA, 18 bp, Homo Sapiens
gggctacgtggacgacac

SEQ ID NO: 4281 - DNA, 18 bp, Homo Sapiens
ggctacgtggacgacacg

SEQ ID NO: 4282 - DNA, 18 bp, Homo Sapiens
gctacgtggacgacacgc

SEQ ID NO: 4283 - DNA, 18 bp, Homo Sapiens
ctacgtggacgacacgca

SEQ ID NO: 4284 - DNA, 18 bp, Homo Sapiens
tacgtggacgacacgcag

SEQ ID NO: 4285 - DNA, 18 bp, Homo Sapiens
acgtggacgacacgcagt

SEQ ID NO: 4286 - DNA, 18 bp, Homo Sapiens
cgtggacgacacgcagtt

SEQ ID NO: 4287 - DNA, 18 bp, Homo Sapiens
gtggacgacacgcagttc

SEQ ID NO: 4288 - DNA, 18 bp, Homo Sapiens
tggacgacacgcagttcg

SEQ ID NO: 4289 - DNA, 18 bp, Homo Sapiens
ggacgacacgcagttcgt

SEQ ID NO: 4290 - DNA, 18 bp, Homo Sapiens
gacgacacgcagttcgtg

SEQ ID NO: 4291 - DNA, 18 bp, Homo Sapiens
acgacacgcagttcgtgc

SEQ ID NO: 4292 - DNA, 18 bp, Homo Sapiens
cgacacgcagttcgtgcg

SEQ ID NO: 4293 - DNA, 18 bp, Homo Sapiens
gacacgcagttcgtgcgg

SEQ ID NO: 4294 - DNA, 18 bp, Homo Sapiens
acacgcagttcgtgcggt

SEQ ID NO: 4295 - DNA, 18 bp, Homo Sapiens
cacgcagttcgtgcggtt

SEQ ID NO: 4296 - DNA, 18 bp, Homo Sapiens
acgcagttcgtgcggttc

SEQ ID NO: 4297 - DNA, 18 bp, Homo Sapiens
cgcagttcgtgcggttcg

SEQ ID NO: 4298 - DNA, 18 bp, Homo Sapiens
gcagttcgtgcggttcga

SEQ ID NO: 4299 - DNA, 18 bp, Homo Sapiens
cagttcgtgcggttcgac

SEQ ID NO: 4300 - DNA, 18 bp, Homo Sapiens
gttcgtgcggttcgacag

SEQ ID NO: 4301 - DNA, 18 bp, Homo Sapiens
ttcgtgcggttcgacagc

SEQ ID NO: 4302 - DNA, 18 bp, Homo Sapiens
tcgtgcggttcgacagcg

SEQ ID NO: 4303 - DNA, 18 bp, Homo Sapiens
cgtgcggttcgacagcga

SEQ ID NO: 4304 - DNA, 18 bp, Homo Sapiens
gtgcggttcgacagcgac

SEQ ID NO: 4305 - DNA, 18 bp, Homo Sapiens
tgcggttcgacagcgacg

SEQ ID NO: 4306 - DNA, 18 bp, Homo Sapiens
gcggttcgacagcgacgc

SEQ ID NO: 4307 - DNA, 18 bp, Homo Sapiens
cggttcgacagcgacgcc

SEQ ID NO: 4308 - DNA, 18 bp, Homo Sapiens
ggttcgacagcgacgccg

SEQ ID NO: 4309 - DNA, 18 bp, Homo Sapiens
gttcgacagcgacgccgc

SEQ ID NO: 4310 - DNA, 18 bp, Homo Sapiens
ttcgacagcgacgccgcg

SEQ ID NO: 4311 - DNA, 18 bp, Homo Sapiens
tcgacagcgacgccgcga

SEQ ID NO: 4312 - DNA, 18 bp, Homo Sapiens
cgacagcgacgccgcgag

SEQ ID NO: 4313 - DNA, 18 bp, Homo Sapiens
gacagcgacgccgcgagc

SEQ ID NO: 4314 - DNA, 18 bp, Homo Sapiens
acagcgacgccgcgagcc

SEQ ID NO: 4315 - DNA, 18 bp, Homo Sapiens
cagcgacgccgcgagcca

SEQ ID NO: 4316 - DNA, 18 bp, Homo Sapiens
agcgacgccgcgagccag

SEQ ID NO: 4317 - DNA, 18 bp, Homo Sapiens
gcgacgccgcgagccaga

SEQ ID NO: 4318 - DNA, 18 bp, Homo Sapiens
cgacgccgcgagccagag

SEQ ID NO: 4319 - DNA, 18 bp, Homo Sapiens
gacgccgcgagccagagg

SEQ ID NO: 4320 - DNA, 18 bp, Homo Sapiens
acgccgcgagccagagga

SEQ ID NO: 4321 - DNA, 18 bp, Homo Sapiens
cgccgcgagccagaggat

SEQ ID NO: 4322 - DNA, 18 bp, Homo Sapiens
gccgcgagccagaggatg

SEQ ID NO: 4323 - DNA, 18 bp, Homo Sapiens
ccgcgagccagaggatgg

SEQ ID NO: 4324 - DNA, 18 bp, Homo Sapiens
cgcgagccagaggatgga

SEQ ID NO: 4325 - DNA, 18 bp, Homo Sapiens
gcgagccagaggatggag

SEQ ID NO: 4326 - DNA, 18 bp, Homo Sapiens
cgagccagaggatggagc

SEQ ID NO: 4327 - DNA, 18 bp, Homo Sapiens
gagccagaggatggagcc

SEQ ID NO: 4328 - DNA, 18 bp, Homo Sapiens
agccagaggatggagccg

SEQ ID NO: 4329 - DNA, 18 bp, Homo Sapiens
gccagaggatggagccgc

SEQ ID NO: 4330 - DNA, 18 bp, Homo Sapiens
ccagaggatggagccgcg

SEQ ID NO: 4331 - DNA, 18 bp, Homo Sapiens
cagaggatggagccgcgg

SEQ ID NO: 4332 - DNA, 18 bp, Homo Sapiens
agaggatggagccgcggg

SEQ ID NO: 4333 - DNA, 18 bp, Homo Sapiens
gaggatggagccgcgggc

SEQ ID NO: 4334 - DNA, 18 bp, Homo Sapiens
aggatggagccgcgggcg

SEQ ID NO: 4335 - DNA, 18 bp, Homo Sapiens
ggatggagccgcgggcgc

SEQ ID NO: 4336 - DNA, 18 bp, Homo Sapiens
gatggagccgcgggcgcc

SEQ ID NO: 4337 - DNA, 18 bp, Homo Sapiens
atggagccgcgggcgccg

SEQ ID NO: 4338 - DNA, 18 bp, Homo Sapiens
tggagccgcgggcgccgt

SEQ ID NO: 4339 - DNA, 18 bp, Homo Sapiens
ggagccgcgggcgccgtg

SEQ ID NO: 4340 - DNA, 18 bp, Homo Sapiens
gagccgcgggcgccgtgg

SEQ ID NO: 4341 - DNA, 18 bp, Homo Sapiens
agccgcgggcgccgtgga

SEQ ID NO: 4342 - DNA, 18 bp, Homo Sapiens
gccgcgggcgccgtggat

SEQ ID NO: 4343 - DNA, 18 bp, Homo Sapiens
ccgcgggcgccgtggata

SEQ ID NO: 4344 - DNA, 18 bp, Homo Sapiens
cgcgggcgccgtggatag

SEQ ID NO: 4345 - DNA, 18 bp, Homo Sapiens
gcgggcgccgtggataga

SEQ ID NO: 4346 - DNA, 18 bp, Homo Sapiens
cgggcgccgtggatagag

SEQ ID NO: 4347 - DNA, 18 bp, Homo Sapiens
gggcgccgtggatagagc

SEQ ID NO: 4348 - DNA, 18 bp, Homo Sapiens
ggcgccgtggatagagca

SEQ ID NO: 4349 - DNA, 18 bp, Homo Sapiens
gcgccgtggatagagcag

SEQ ID NO: 4350 - DNA, 18 bp, Homo Sapiens
cgccgtggatagagcagg

SEQ ID NO: 4351 - DNA, 18 bp, Homo Sapiens
gccgtggatagagcagga

SEQ ID NO: 4352 - DNA, 18 bp, Homo Sapiens
ccgtggatagagcaggag

SEQ ID NO: 4353 - DNA, 18 bp, Homo Sapiens
cgtggatagagcaggagg

SEQ ID NO: 4354 - DNA, 18 bp, Homo Sapiens
gtggatagagcaggaggg

SEQ ID NO: 4355 - DNA, 18 bp, Homo Sapiens
ggatagagcaggagggtc

SEQ ID NO: 4356 - DNA, 18 bp, Homo Sapiens
gatagagcaggagggtcc

SEQ ID NO: 4357 - DNA, 18 bp, Homo Sapiens
atagagcaggagggtccg

SEQ ID NO: 4358 - DNA, 18 bp, Homo Sapiens
tagagcaggagggtccgg

SEQ ID NO: 4359 - DNA, 18 bp, Homo Sapiens
agagcaggagggtccgga

SEQ ID NO: 4360 - DNA, 18 bp, Homo Sapiens
gagcaggagggtccggag

SEQ ID NO: 4361 - DNA, 18 bp, Homo Sapiens
agcaggagggtccggagt

SEQ ID NO: 4362 - DNA, 18 bp, Homo Sapiens
gcaggagggtccggagta

SEQ ID NO: 4363 - DNA, 18 bp, Homo Sapiens
caggagggtccggagtat

SEQ ID NO: 4364 - DNA, 18 bp, Homo Sapiens
ggagggtccggagtattg

SEQ ID NO: 4365 - DNA, 18 bp, Homo Sapiens
gagggtccggagtattgg

SEQ ID NO: 4366 - DNA, 18 bp, Homo Sapiens
agggtccggagtattggg

SEQ ID NO: 4367 - DNA, 18 bp, Homo Sapiens
gggtccggagtattggga

SEQ ID NO: 4368 - DNA, 18 bp, Homo Sapiens
ggtccggagtattgggac

SEQ ID NO: 4369 - DNA, 18 bp, Homo Sapiens
gtccggagtattgggacg

SEQ ID NO: 4370 - DNA, 18 bp, Homo Sapiens
tccggagtattgggacgg

SEQ ID NO: 4371 - DNA, 18 bp, Homo Sapiens
ccggagtattgggacggg

SEQ ID NO: 4372 - DNA, 18 bp, Homo Sapiens
cggagtattgggacgggg

SEQ ID NO: 4373 - DNA, 18 bp, Homo Sapiens
ggagtattgggacgggga

SEQ ID NO: 4374 - DNA, 18 bp, Homo Sapiens
gagtattgggacggggag

SEQ ID NO: 4375 - DNA, 18 bp, Homo Sapiens
gtattgggacggggagac

SEQ ID NO: 4376 - DNA, 18 bp, Homo Sapiens
attgggacggggagacac

SEQ ID NO: 4377 - DNA, 18 bp, Homo Sapiens
ttgggacggggagacacg

SEQ ID NO: 4378 - DNA, 18 bp, Homo Sapiens
tgggacggggagacacgg

SEQ ID NO: 4379 - DNA, 18 bp, Homo Sapiens
gggacggggagacacgga

SEQ ID NO: 4380 - DNA, 18 bp, Homo Sapiens
ggacggggagacacggaa

SEQ ID NO: 4381 - DNA, 18 bp, Homo Sapiens
gacggggagacacggaaa

SEQ ID NO: 4382 - DNA, 18 bp, Homo Sapiens
acggggagacacggaaag

SEQ ID NO: 4383 - DNA, 18 bp, Homo Sapiens
cggggagacacggaaagt

SEQ ID NO: 4384 - DNA, 18 bp, Homo Sapiens
ggggagacacggaaagtg

SEQ ID NO: 4385 - DNA, 18 bp, Homo Sapiens
cacggaaagtgaaggccc

SEQ ID NO: 4386 - DNA, 18 bp, Homo Sapiens
cggaaagtgaaggcccac

SEQ ID NO: 4387 - DNA, 18 bp, Homo Sapiens
gtgaaggcccactcacag

SEQ ID NO: 4388 - DNA, 18 bp, Homo Sapiens
gaaggcccactcacagac

SEQ ID NO: 4389 - DNA, 18 bp, Homo Sapiens
aggcccactcacagactc

SEQ ID NO: 4390 - DNA, 18 bp, Homo Sapiens
ggcccactcacagactca

SEQ ID NO: 4391 - DNA, 18 bp, Homo Sapiens
gcccactcacagactcac

SEQ ID NO: 4392 - DNA, 18 bp, Homo Sapiens
cccactcacagactcacc

SEQ ID NO: 4393 - DNA, 18 bp, Homo Sapiens
ccactcacagactcaccg

SEQ ID NO: 4394 - DNA, 18 bp, Homo Sapiens
cacagactcaccgagtgg

SEQ ID NO: 4395 - DNA, 18 bp, Homo Sapiens
cagactcaccgagtggac

SEQ ID NO: 4396 - DNA, 18 bp, Homo Sapiens
agactcaccgagtggacc

SEQ ID NO: 4397 - DNA, 18 bp, Homo Sapiens
gactcaccgagtggacct

SEQ ID NO: 4398 - DNA, 18 bp, Homo Sapiens
actcaccgagtggacctg

SEQ ID NO: 4399 - DNA, 18 bp, Homo Sapiens
ctcaccgagtggacctgg

SEQ ID NO: 4400 - DNA, 18 bp, Homo Sapiens
tcaccgagtggacctggg

SEQ ID NO: 4401 - DNA, 18 bp, Homo Sapiens
caccgagtggacctgggg

SEQ ID NO: 4402 - DNA, 18 bp, Homo Sapiens
accgagtggacctgggga

SEQ ID NO: 4403 - DNA, 18 bp, Homo Sapiens
ccgagtggacctggggac

SEQ ID NO: 4404 - DNA, 18 bp, Homo Sapiens
cgagtggacctggggacc

SEQ ID NO: 4405 - DNA, 18 bp, Homo Sapiens
gagtggacctggggaccc

SEQ ID NO: 4406 - DNA, 18 bp, Homo Sapiens
agtggacctggggaccct

SEQ ID NO: 4407 - DNA, 18 bp, Homo Sapiens
gtggacctggggaccctg

SEQ ID NO: 4408 - DNA, 18 bp, Homo Sapiens
tggacctggggaccctgc

SEQ ID NO: 4409 - DNA, 18 bp, Homo Sapiens
ggacctggggaccctgcg

SEQ ID NO: 4410 - DNA, 18 bp, Homo Sapiens
gacctggggaccctgcgc

SEQ ID NO: 4411 - DNA, 18 bp, Homo Sapiens
acctggggaccctgcgcg

SEQ ID NO: 4412 - DNA, 18 bp, Homo Sapiens
cctggggaccctgcgcgg

SEQ ID NO: 4413 - DNA, 18 bp, Homo Sapiens
ctggggaccctgcgcggc

SEQ ID NO: 4414 - DNA, 18 bp, Homo Sapiens
tggggaccctgcgcggct

SEQ ID NO: 4415 - DNA, 18 bp, Homo Sapiens
ggggaccctgcgcggcta

SEQ ID NO: 4416 - DNA, 18 bp, Homo Sapiens
gggaccctgcgcggctac

SEQ ID NO: 4417 - DNA, 18 bp, Homo Sapiens
ggaccctgcgcggctact

SEQ ID NO: 4418 - DNA, 18 bp, Homo Sapiens
gaccctgcgcggctacta

SEQ ID NO: 4419 - DNA, 18 bp, Homo Sapiens
accctgcgcggctactac

SEQ ID NO: 4420 - DNA, 18 bp, Homo Sapiens
ccctgcgcggctactaca

SEQ ID NO: 4421 - DNA, 18 bp, Homo Sapiens
cctgcgcggctactacaa

SEQ ID NO: 4422 - DNA, 18 bp, Homo Sapiens
ctgcgcggctactacaac

SEQ ID NO: 4423 - DNA, 18 bp, Homo Sapiens
tgcgcggctactacaacc

SEQ ID NO: 4424 - DNA, 18 bp, Homo Sapiens
gcgcggctactacaacca

SEQ ID NO: 4425 - DNA, 18 bp, Homo Sapiens
cgcggctactacaaccag

SEQ ID NO: 4426 - DNA, 18 bp, Homo Sapiens
ctacaaccagagcgaggc

SEQ ID NO: 4427 - DNA, 18 bp, Homo Sapiens
tacaaccagagcgaggcc

SEQ ID NO: 4428 - DNA, 18 bp, Homo Sapiens
acaaccagagcgaggccg

SEQ ID NO: 4429 - DNA, 18 bp, Homo Sapiens
caaccagagcgaggccgg

SEQ ID NO: 4430 - DNA, 18 bp, Homo Sapiens
aaccagagcgaggccggt

SEQ ID NO: 4431 - DNA, 18 bp, Homo Sapiens
accagagcgaggccggtt

SEQ ID NO: 4432 - DNA, 18 bp, Homo Sapiens
ccagagcgaggccggttc

SEQ ID NO: 4433 - DNA, 18 bp, Homo Sapiens
cagagcgaggccggttct

SEQ ID NO: 4434 - DNA, 18 bp, Homo Sapiens
agagcgaggccggttctc

SEQ ID NO: 4435 - DNA, 18 bp, Homo Sapiens
gagcgaggccggttctca

SEQ ID NO: 4436 - DNA, 18 bp, Homo Sapiens
agcgaggccggttctcac

SEQ ID NO: 4437 - DNA, 18 bp, Homo Sapiens
gcgaggccggttctcaca

SEQ ID NO: 4438 - DNA, 18 bp, Homo Sapiens
cgaggccggttctcacac

SEQ ID NO: 4439 - DNA, 18 bp, Homo Sapiens
gaggccggttctcacacc

SEQ ID NO: 4440 - DNA, 18 bp, Homo Sapiens
aggccggttctcacaccg

SEQ ID NO: 4441 - DNA, 18 bp, Homo Sapiens
ggccggttctcacaccgt

SEQ ID NO: 4442 - DNA, 18 bp, Homo Sapiens
gccggttctcacaccgtc

SEQ ID NO: 4443 - DNA, 18 bp, Homo Sapiens
ccggttctcacaccgtcc

SEQ ID NO: 4444 - DNA, 18 bp, Homo Sapiens
cggttctcacaccgtcca

SEQ ID NO: 4445 - DNA, 18 bp, Homo Sapiens
ggttctcacaccgtccag

SEQ ID NO: 4446 - DNA, 18 bp, Homo Sapiens
tctcacaccgtccagagg

SEQ ID NO: 4447 - DNA, 18 bp, Homo Sapiens
ctcacaccgtccagagga

SEQ ID NO: 4448 - DNA, 18 bp, Homo Sapiens
cacaccgtccagaggatg

SEQ ID NO: 4449 - DNA, 18 bp, Homo Sapiens
ggatgtatggctgcgacg

SEQ ID NO: 4450 - DNA, 18 bp, Homo Sapiens
tgtatggctgcgacgtgg

SEQ ID NO: 4451 - DNA, 18 bp, Homo Sapiens
gtatggctgcgacgtggg

SEQ ID NO: 4452 - DNA, 18 bp, Homo Sapiens
tatggctgcgacgtgggg

SEQ ID NO: 4453 - DNA, 18 bp, Homo Sapiens
atggctgcgacgtggggt

SEQ ID NO: 4454 - DNA, 18 bp, Homo Sapiens
tggctgcgacgtggggtc

SEQ ID NO: 4455 - DNA, 18 bp, Homo Sapiens
ggctgcgacgtggggtcg

SEQ ID NO: 4456 - DNA, 18 bp, Homo Sapiens
gctgcgacgtggggtcgg

SEQ ID NO: 4457 - DNA, 18 bp, Homo Sapiens
ctgcgacgtggggtcgga

SEQ ID NO: 4458 - DNA, 18 bp, Homo Sapiens
tgcgacgtggggtcggac

SEQ ID NO: 4459 - DNA, 18 bp, Homo Sapiens
gcgacgtggggtcggact

SEQ ID NO: 4460 - DNA, 18 bp, Homo Sapiens
cgacgtggggtcggactg

SEQ ID NO: 4461 - DNA, 18 bp, Homo Sapiens
gacgtggggtcggactgg

SEQ ID NO: 4462 - DNA, 18 bp, Homo Sapiens
acgtggggtcggactggc

SEQ ID NO: 4463 - DNA, 18 bp, Homo Sapiens
cgtggggtcggactggcg

SEQ ID NO: 4464 - DNA, 18 bp, Homo Sapiens
gtggggtcggactggcgc

SEQ ID NO: 4465 - DNA, 18 bp, Homo Sapiens
tggggtcggactggcgct

SEQ ID NO: 4466 - DNA, 18 bp, Homo Sapiens
ggggtcggactggcgctt

SEQ ID NO: 4467 - DNA, 18 bp, Homo Sapiens
gggtcggactggcgcttc

SEQ ID NO: 4468 - DNA, 18 bp, Homo Sapiens
ggtcggactggcgcttcc

SEQ ID NO: 4469 - DNA, 18 bp, Homo Sapiens
gtcggactggcgcttcct

SEQ ID NO: 4470 - DNA, 18 bp, Homo Sapiens
tcggactggcgcttcctc

SEQ ID NO: 4471 - DNA, 18 bp, Homo Sapiens
cggactggcgcttcctcc

SEQ ID NO: 4472 - DNA, 18 bp, Homo Sapiens
ggactggcgcttcctccg

SEQ ID NO: 4473 - DNA, 18 bp, Homo Sapiens
gactggcgcttcctccgc

SEQ ID NO: 4474 - DNA, 18 bp, Homo Sapiens
actggcgcttcctccgcg

SEQ ID NO: 4475 - DNA, 18 bp, Homo Sapiens
ctggcgcttcctccgcgg

SEQ ID NO: 4476 - DNA, 18 bp, Homo Sapiens
tggcgcttcctccgcggg

SEQ ID NO: 4477 - DNA, 18 bp, Homo Sapiens
ggcgcttcctccgcgggt

SEQ ID NO: 4478 - DNA, 18 bp, Homo Sapiens
gcgcttcctccgcgggta

SEQ ID NO: 4479 - DNA, 18 bp, Homo Sapiens
cgcttcctccgcgggtac

SEQ ID NO: 4480 - DNA, 18 bp, Homo Sapiens
gcttcctccgcgggtacc

SEQ ID NO: 4481 - DNA, 18 bp, Homo Sapiens
cttcctccgcgggtacca

SEQ ID NO: 4482 - DNA, 18 bp, Homo Sapiens
ttcctccgcgggtaccac

SEQ ID NO: 4483 - DNA, 18 bp, Homo Sapiens
tcctccgcgggtaccacc

SEQ ID NO: 4484 - DNA, 18 bp, Homo Sapiens
cctccgcgggtaccacca

SEQ ID NO: 4485 - DNA, 18 bp, Homo Sapiens
ctccgcgggtaccaccag

SEQ ID NO: 4486 - DNA, 18 bp, Homo Sapiens
tccgcgggtaccaccagt

SEQ ID NO: 4487 - DNA, 18 bp, Homo Sapiens
ccgcgggtaccaccagta

SEQ ID NO: 4488 - DNA, 18 bp, Homo Sapiens
cgcgggtaccaccagtac

SEQ ID NO: 4489 - DNA, 18 bp, Homo Sapiens
gcgggtaccaccagtacg

SEQ ID NO: 4490 - DNA, 18 bp, Homo Sapiens
cgggtaccaccagtacgc

SEQ ID NO: 4491 - DNA, 18 bp, Homo Sapiens
gggtaccaccagtacgcc

SEQ ID NO: 4492 - DNA, 18 bp, Homo Sapiens
ggtaccaccagtacgcct

SEQ ID NO: 4493 - DNA, 18 bp, Homo Sapiens
accaccagtacgcctacg

SEQ ID NO: 4494 - DNA, 18 bp, Homo Sapiens
ccaccagtacgcctacga

SEQ ID NO: 4495 - DNA, 18 bp, Homo Sapiens
caccagtacgcctacgac

SEQ ID NO: 4496 - DNA, 18 bp, Homo Sapiens
accagtacgcctacgacg

SEQ ID NO: 4497 - DNA, 18 bp, Homo Sapiens
ccagtacgcctacgacgg

SEQ ID NO: 4498 - DNA, 18 bp, Homo Sapiens
cagtacgcctacgacggc

SEQ ID NO: 4499 - DNA, 18 bp, Homo Sapiens
agtacgcctacgacggca

SEQ ID NO: 4500 - DNA, 18 bp, Homo Sapiens
gtacgcctacgacggcaa

SEQ ID NO: 4501 - DNA, 18 bp, Homo Sapiens
tacgcctacgacggcaag

SEQ ID NO: 4502 - DNA, 18 bp, Homo Sapiens
acgcctacgacggcaagg

SEQ ID NO: 4503 - DNA, 18 bp, Homo Sapiens
cgcctacgacggcaagga

SEQ ID NO: 4504 - DNA, 18 bp, Homo Sapiens
gcctacgacggcaaggat

SEQ ID NO: 4505 - DNA, 18 bp, Homo Sapiens
tcgccctgaaagaggacc

SEQ ID NO: 4506 - DNA, 18 bp, Homo Sapiens
cgccctgaaagaggacct

SEQ ID NO: 4507 - DNA, 18 bp, Homo Sapiens
gccctgaaagaggacctg

SEQ ID NO: 4508 - DNA, 18 bp, Homo Sapiens
ccctgaaagaggacctgc

SEQ ID NO: 4509 - DNA, 18 bp, Homo Sapiens
cctgaaagaggacctgcg

SEQ ID NO: 4510 - DNA, 18 bp, Homo Sapiens
ctgaaagaggacctgcgc

SEQ ID NO: 4511 - DNA, 18 bp, Homo Sapiens
gaaagaggacctgcgctc

SEQ ID NO: 4512 - DNA, 18 bp, Homo Sapiens
agaggacctgcgctcttg

SEQ ID NO: 4513 - DNA, 18 bp, Homo Sapiens
gaggacctgcgctcttgg

SEQ ID NO: 4514 - DNA, 18 bp, Homo Sapiens
aggacctgcgctcttgga

SEQ ID NO: 4515 - DNA, 18 bp, Homo Sapiens
ggacctgcgctcttggac

SEQ ID NO: 4516 - DNA, 18 bp, Homo Sapiens
gacctgcgctcttggacc

SEQ ID NO: 4517 - DNA, 18 bp, Homo Sapiens
acctgcgctcttggaccg

SEQ ID NO: 4518 - DNA, 18 bp, Homo Sapiens
cctgcgctcttggaccgc

SEQ ID NO: 4519 - DNA, 18 bp, Homo Sapiens
ctgcgctcttggaccgcg

SEQ ID NO: 4520 - DNA, 18 bp, Homo Sapiens
tgcgctcttggaccgcgg

SEQ ID NO: 4521 - DNA, 18 bp, Homo Sapiens
gcgctcttggaccgcggc

SEQ ID NO: 4522 - DNA, 18 bp, Homo Sapiens
cgctcttggaccgcggcg

SEQ ID NO: 4523 - DNA, 18 bp, Homo Sapiens
gctcttggaccgcggcgg

SEQ ID NO: 4524 - DNA, 18 bp, Homo Sapiens
ctcttggaccgcggcgga

SEQ ID NO: 4525 - DNA, 18 bp, Homo Sapiens
tcttggaccgcggcggac

SEQ ID NO: 4526 - DNA, 18 bp, Homo Sapiens
cttggaccgcggcggaca

SEQ ID NO: 4527 - DNA, 18 bp, Homo Sapiens
ttggaccgcggcggacat

SEQ ID NO: 4528 - DNA, 18 bp, Homo Sapiens
tggaccgcggcggacatg

SEQ ID NO: 4529 - DNA, 18 bp, Homo Sapiens
ggaccgcggcggacatgg

SEQ ID NO: 4530 - DNA, 18 bp, Homo Sapiens
gaccgcggcggacatggc

SEQ ID NO: 4531 - DNA, 18 bp, Homo Sapiens
accgcggcggacatggca

SEQ ID NO: 4532 - DNA, 18 bp, Homo Sapiens
ccgcggcggacatggcag

SEQ ID NO: 4533 - DNA, 18 bp, Homo Sapiens
cgcggcggacatggcagc

SEQ ID NO: 4534 - DNA, 18 bp, Homo Sapiens
gcggcggacatggcagct

SEQ ID NO: 4535 - DNA, 18 bp, Homo Sapiens
cggcggacatggcagctc

SEQ ID NO: 4536 - DNA, 18 bp, Homo Sapiens
ggcggacatggcagctca

SEQ ID NO: 4537 - DNA, 18 bp, Homo Sapiens
gcggacatggcagctcag

SEQ ID NO: 4538 - DNA, 18 bp, Homo Sapiens
cggacatggcagctcaga

SEQ ID NO: 4539 - DNA, 18 bp, Homo Sapiens
ggacatggcagctcagac

SEQ ID NO: 4540 - DNA, 18 bp, Homo Sapiens
gacatggcagctcagacc

SEQ ID NO: 4541 - DNA, 18 bp, Homo Sapiens
catggcagctcagaccac

SEQ ID NO: 4542 - DNA, 18 bp, Homo Sapiens
atggcagctcagaccacc

SEQ ID NO: 4543 - DNA, 18 bp, Homo Sapiens
tggcagctcagaccacca

SEQ ID NO: 4544 - DNA, 18 bp, Homo Sapiens
ggcagctcagaccaccaa

SEQ ID NO: 4545 - DNA, 18 bp, Homo Sapiens
gcagctcagaccaccaag

SEQ ID NO: 4546 - DNA, 18 bp, Homo Sapiens
cagctcagaccaccaagc

SEQ ID NO: 4547 - DNA, 18 bp, Homo Sapiens
gctcagaccaccaagcac

SEQ ID NO: 4548 - DNA, 18 bp, Homo Sapiens
ccaccaagcacaagtggg

SEQ ID NO: 4549 - DNA, 18 bp, Homo Sapiens
ccaagcacaagtgggagg

SEQ ID NO: 4550 - DNA, 18 bp, Homo Sapiens
caagcacaagtgggaggc

SEQ ID NO: 4551 - DNA, 18 bp, Homo Sapiens
aagcacaagtgggaggcg

SEQ ID NO: 4552 - DNA, 18 bp, Homo Sapiens
agcacaagtgggaggcgg

SEQ ID NO: 4553 - DNA, 18 bp, Homo Sapiens
gcacaagtgggaggcggc

SEQ ID NO: 4554 - DNA, 18 bp, Homo Sapiens
cacaagtgggaggcggcc

SEQ ID NO: 4555 - DNA, 18 bp, Homo Sapiens
acaagtgggaggcggccc

SEQ ID NO: 4556 - DNA, 18 bp, Homo Sapiens
caagtgggaggcggccca

SEQ ID NO: 4557 - DNA, 18 bp, Homo Sapiens
aagtgggaggcggcccat

SEQ ID NO: 4558 - DNA, 18 bp, Homo Sapiens
agtgggaggcggcccatg

SEQ ID NO: 4559 - DNA, 18 bp, Homo Sapiens
gtgggaggcggcccatgt

SEQ ID NO: 4560 - DNA, 18 bp, Homo Sapiens
tgggaggcggcccatgtg

SEQ ID NO: 4561 - DNA, 18 bp, Homo Sapiens
gggaggcggcccatgtgg

SEQ ID NO: 4562 - DNA, 18 bp, Homo Sapiens
ggaggcggcccatgtggc

SEQ ID NO: 4563 - DNA, 18 bp, Homo Sapiens
gaggcggcccatgtggcg

SEQ ID NO: 4564 - DNA, 18 bp, Homo Sapiens
aggcggcccatgtggcgg

SEQ ID NO: 4565 - DNA, 18 bp, Homo Sapiens
ggcggcccatgtggcgga

SEQ ID NO: 4566 - DNA, 18 bp, Homo Sapiens
gcggcccatgtggcggag

SEQ ID NO: 4567 - DNA, 18 bp, Homo Sapiens
cggcccatgtggcggagc

SEQ ID NO: 4568 - DNA, 18 bp, Homo Sapiens
ggcccatgtggcggagca

SEQ ID NO: 4569 - DNA, 18 bp, Homo Sapiens
gcccatgtggcggagcag

SEQ ID NO: 4570 - DNA, 18 bp, Homo Sapiens
cccatgtggcggagcagt

SEQ ID NO: 4571 - DNA, 18 bp, Homo Sapiens
ccatgtggcggagcagtt

SEQ ID NO: 4572 - DNA, 18 bp, Homo Sapiens
catgtggcggagcagttg

SEQ ID NO: 4573 - DNA, 18 bp, Homo Sapiens
tgtggcggagcagttgag

SEQ ID NO: 4574 - DNA, 18 bp, Homo Sapiens
gtggcggagcagttgaga

SEQ ID NO: 4575 - DNA, 18 bp, Homo Sapiens
tggcggagcagttgagag

SEQ ID NO: 4576 - DNA, 18 bp, Homo Sapiens
ggcggagcagttgagagc

SEQ ID NO: 4577 - DNA, 18 bp, Homo Sapiens
gcggagcagttgagagcc

SEQ ID NO: 4578 - DNA, 18 bp, Homo Sapiens
cggagcagttgagagcct

SEQ ID NO: 4579 - DNA, 18 bp, Homo Sapiens
tgagagcctacctggagg

SEQ ID NO: 4580 - DNA, 18 bp, Homo Sapiens
gagagcctacctggaggg

SEQ ID NO: 4581 - DNA, 18 bp, Homo Sapiens
agagcctacctggagggc

SEQ ID NO: 4582 - DNA, 18 bp, Homo Sapiens
gagcctacctggagggca

SEQ ID NO: 4583 - DNA, 18 bp, Homo Sapiens
agcctacctggagggcac

SEQ ID NO: 4584 - DNA, 18 bp, Homo Sapiens
gcctacctggagggcacg

SEQ ID NO: 4585 - DNA, 18 bp, Homo Sapiens
cctacctggagggcacgt

SEQ ID NO: 4586 - DNA, 18 bp, Homo Sapiens
ctacctggagggcacgtg

SEQ ID NO: 4587 - DNA, 18 bp, Homo Sapiens
tacctggagggcacgtgc

SEQ ID NO: 4588 - DNA, 18 bp, Homo Sapiens
acctggagggcacgtgcg

SEQ ID NO: 4589 - DNA, 18 bp, Homo Sapiens
cctggagggcacgtgcgt

SEQ ID NO: 4590 - DNA, 18 bp, Homo Sapiens
ctggagggcacgtgcgtg

SEQ ID NO: 4591 - DNA, 18 bp, Homo Sapiens
tggagggcacgtgcgtgg

SEQ ID NO: 4592 - DNA, 18 bp, Homo Sapiens
ggagggcacgtgcgtgga

SEQ ID NO: 4593 - DNA, 18 bp, Homo Sapiens
gagggcacgtgcgtggag

SEQ ID NO: 4594 - DNA, 18 bp, Homo Sapiens
agggcacgtgcgtggagt

SEQ ID NO: 4595 - DNA, 18 bp, Homo Sapiens
gggcacgtgcgtggagtg

SEQ ID NO: 4596 - DNA, 18 bp, Homo Sapiens
ggcacgtgcgtggagtgg

SEQ ID NO: 4597 - DNA, 18 bp, Homo Sapiens
gcacgtgcgtggagtggc

SEQ ID NO: 4598 - DNA, 18 bp, Homo Sapiens
cacgtgcgtggagtggct

SEQ ID NO: 4599 - DNA, 18 bp, Homo Sapiens
acgtgcgtggagtggctc

SEQ ID NO: 4600 - DNA, 18 bp, Homo Sapiens
cgtgcgtggagtggctcc

SEQ ID NO: 4601 - DNA, 18 bp, Homo Sapiens
gtgcgtggagtggctccg

SEQ ID NO: 4602 - DNA, 18 bp, Homo Sapiens
tgcgtggagtggctccgc

SEQ ID NO: 4603 - DNA, 18 bp, Homo Sapiens
gcgtggagtggctccgca

SEQ ID NO: 4604 - DNA, 18 bp, Homo Sapiens
cgtggagtggctccgcag

SEQ ID NO: 4605 - DNA, 18 bp, Homo Sapiens
gtggagtggctccgcaga

SEQ ID NO: 4606 - DNA, 18 bp, Homo Sapiens
tggagtggctccgcagat

SEQ ID NO: 4607 - DNA, 18 bp, Homo Sapiens
ggagtggctccgcagata

SEQ ID NO: 4608 - DNA, 18 bp, Homo Sapiens
gagtggctccgcagatac

SEQ ID NO: 4609 - DNA, 18 bp, Homo Sapiens
agtggctccgcagatacc

SEQ ID NO: 4610 - DNA, 18 bp, Homo Sapiens
gtggctccgcagatacct

SEQ ID NO: 4611 - DNA, 18 bp, Homo Sapiens
tggctccgcagatacctg

SEQ ID NO: 4612 - DNA, 18 bp, Homo Sapiens
ggctccgcagatacctgg

SEQ ID NO: 4613 - DNA, 18 bp, Homo Sapiens
gctccgcagatacctgga

SEQ ID NO: 4614 - DNA, 18 bp, Homo Sapiens
ctccgcagatacctggag

SEQ ID NO: 4615 - DNA, 18 bp, Homo Sapiens
acctggagaacgggaagg

SEQ ID NO: 4616 - DNA, 18 bp, Homo Sapiens
cctggagaacgggaagga

SEQ ID NO: 4617 - DNA, 18 bp, Homo Sapiens
ctggagaacgggaaggag

SEQ ID NO: 4618 - DNA, 18 bp, Homo Sapiens
ggagaacgggaaggagac

SEQ ID NO: 4619 - DNA, 18 bp, Homo Sapiens
gagaacgggaaggagacg

SEQ ID NO: 4620 - DNA, 18 bp, Homo Sapiens
agaacgggaaggagacgc

SEQ ID NO: 4621 - DNA, 18 bp, Homo Sapiens
gaacgggaaggagacgct

SEQ ID NO: 4622 - DNA, 18 bp, Homo Sapiens
aacgggaaggagacgctg

SEQ ID NO: 4623 - DNA, 18 bp, Homo Sapiens
acgggaaggagacgctgc

SEQ ID NO: 4624 - DNA, 18 bp, Homo Sapiens
cgggaaggagacgctgca

SEQ ID NO: 4625 - DNA, 18 bp, Homo Sapiens
gggaaggagacgctgcag

SEQ ID NO: 4626 - DNA, 18 bp, Homo Sapiens
ggaaggagacgctgcagc

SEQ ID NO: 4627 - DNA, 18 bp, Homo Sapiens
gaaggagacgctgcagcg

SEQ ID NO: 4628 - DNA, 18 bp, Homo Sapiens
aaggagacgctgcagcgc

SEQ ID NO: 4629 - DNA, 18 bp, Homo Sapiens
aggagacgctgcagcgca

SEQ ID NO: 4630 - DNA, 18 bp, Homo Sapiens
ggagacgctgcagcgcac

SEQ ID NO: 4631 - DNA, 18 bp, Homo Sapiens
gagacgctgcagcgcacg

SEQ ID NO: 4632 - DNA, 18 bp, Homo Sapiens
agacgctgcagcgcacgg

SEQ ID NO: 4633 - DNA, 18 bp, Homo Sapiens
gacgctgcagcgcacgga

SEQ ID NO: 4634 - DNA, 18 bp, Homo Sapiens
acgctgcagcgcacggac

SEQ ID NO: 4635 - DNA, 18 bp, Homo Sapiens
cgctgcagcgcacggacg

SEQ ID NO: 4636 - DNA, 18 bp, Homo Sapiens
gctgcagcgcacggacgc

SEQ ID NO: 4637 - DNA, 18 bp, Homo Sapiens
ctgcagcgcacggacgcc

SEQ ID NO: 4638 - DNA, 18 bp, Homo Sapiens
tgcagcgcacggacgccc

SEQ ID NO: 4639 - DNA, 18 bp, Homo Sapiens
gcagcgcacggacgcccc

SEQ ID NO: 4640 - DNA, 18 bp, Homo Sapiens
cagcgcacggacgccccc

SEQ ID NO: 4641 - DNA, 18 bp, Homo Sapiens
agcgcacggacgccccca

SEQ ID NO: 4642 - DNA, 18 bp, Homo Sapiens
gcgcacggacgcccccaa

SEQ ID NO: 4643 - DNA, 18 bp, Homo Sapiens
cgcacggacgcccccaaa

SEQ ID NO: 4644 - DNA, 18 bp, Homo Sapiens
gcacggacgcccccaaaa

SEQ ID NO: 4645 - DNA, 18 bp, Homo Sapiens
cacggacgcccccaaaac

SEQ ID NO: 4646 - DNA, 18 bp, Homo Sapiens
acggacgcccccaaaacg

SEQ ID NO: 4647 - DNA, 18 bp, Homo Sapiens
cggacgcccccaaaacgc

SEQ ID NO: 4648 - DNA, 18 bp, Homo Sapiens
ggacgcccccaaaacgca

SEQ ID NO: 4649 - DNA, 18 bp, Homo Sapiens
gacgcccccaaaacgcat

SEQ ID NO: 4650 - DNA, 18 bp, Homo Sapiens
gactcaccacgctgtctc

SEQ ID NO: 4651 - DNA, 18 bp, Homo Sapiens
ctcaccacgctgtctctg

SEQ ID NO: 4652 - DNA, 18 bp, Homo Sapiens
caccacgctgtctctgac

SEQ ID NO: 4653 - DNA, 18 bp, Homo Sapiens
accacgctgtctctgacc

SEQ ID NO: 4654 - DNA, 18 bp, Homo Sapiens
ccacgctgtctctgacca

SEQ ID NO: 4655 - DNA, 18 bp, Homo Sapiens
ctgaccatgaagccaccc

SEQ ID NO: 4656 - DNA, 18 bp, Homo Sapiens
gaccatgaagccaccctg

SEQ ID NO: 4657 - DNA, 18 bp, Homo Sapiens
ccatgaagccaccctgag

SEQ ID NO: 4658 - DNA, 18 bp, Homo Sapiens
catgaagccaccctgagg

SEQ ID NO: 4659 - DNA, 18 bp, Homo Sapiens
tgaagccaccctgaggtg

SEQ ID NO: 4660 - DNA, 18 bp, Homo Sapiens
gaagccaccctgaggtgc

SEQ ID NO: 4661 - DNA, 18 bp, Homo Sapiens
aagccaccctgaggtgct

SEQ ID NO: 4662 - DNA, 18 bp, Homo Sapiens
agccaccctgaggtgctg

SEQ ID NO: 4663 - DNA, 18 bp, Homo Sapiens
gccaccctgaggtgctgg

SEQ ID NO: 4664 - DNA, 18 bp, Homo Sapiens
ccaccctgaggtgctggg

SEQ ID NO: 4665 - DNA, 18 bp, Homo Sapiens
caccctgaggtgctgggc

SEQ ID NO: 4666 - DNA, 18 bp, Homo Sapiens
accctgaggtgctgggcc

SEQ ID NO: 4667 - DNA, 18 bp, Homo Sapiens
ccctgaggtgctgggccc

SEQ ID NO: 4668 - DNA, 18 bp, Homo Sapiens
cctgaggtgctgggccct

SEQ ID NO: 4669 - DNA, 18 bp, Homo Sapiens
ctgaggtgctgggccctg

SEQ ID NO: 4670 - DNA, 18 bp, Homo Sapiens
tgaggtgctgggccctga

SEQ ID NO: 4671 - DNA, 18 bp, Homo Sapiens
gaggtgctgggccctgag

SEQ ID NO: 4672 - DNA, 18 bp, Homo Sapiens
aggtgctgggccctgagc

SEQ ID NO: 4673 - DNA, 18 bp, Homo Sapiens
ggtgctgggccctgagct

SEQ ID NO: 4674 - DNA, 18 bp, Homo Sapiens
gtgctgggccctgagctt

SEQ ID NO: 4675 - DNA, 18 bp, Homo Sapiens
tgctgggccctgagcttc

SEQ ID NO: 4676 - DNA, 18 bp, Homo Sapiens
gctgggccctgagcttct

SEQ ID NO: 4677 - DNA, 18 bp, Homo Sapiens
ctgggccctgagcttcta

SEQ ID NO: 4678 - DNA, 18 bp, Homo Sapiens
tgggccctgagcttctac

SEQ ID NO: 4679 - DNA, 18 bp, Homo Sapiens
gggccctgagcttctacc

SEQ ID NO: 4680 - DNA, 18 bp, Homo Sapiens
ggccctgagcttctaccc

SEQ ID NO: 4681 - DNA, 18 bp, Homo Sapiens
gccctgagcttctaccct

SEQ ID NO: 4682 - DNA, 18 bp, Homo Sapiens
ccctgagcttctaccctg

SEQ ID NO: 4683 - DNA, 18 bp, Homo Sapiens
cctgagcttctaccctgc

SEQ ID NO: 4684 - DNA, 18 bp, Homo Sapiens
ctgagcttctaccctgcg

SEQ ID NO: 4685 - DNA, 18 bp, Homo Sapiens
tgagcttctaccctgcgg

SEQ ID NO: 4686 - DNA, 18 bp, Homo Sapiens
gagcttctaccctgcgga

SEQ ID NO: 4687 - DNA, 18 bp, Homo Sapiens
agcttctaccctgcggag

SEQ ID NO: 4688 - DNA, 18 bp, Homo Sapiens
gcttctaccctgcggaga

SEQ ID NO: 4689 - DNA, 18 bp, Homo Sapiens
ctaccctgcggagatcac

SEQ ID NO: 4690 - DNA, 18 bp, Homo Sapiens
accctgcggagatcacac

SEQ ID NO: 4691 - DNA, 18 bp, Homo Sapiens
ccctgcggagatcacact

SEQ ID NO: 4692 - DNA, 18 bp, Homo Sapiens
cctgcggagatcacactg

SEQ ID NO: 4693 - DNA, 18 bp, Homo Sapiens
gcggagatcacactgacc

SEQ ID NO: 4694 - DNA, 18 bp, Homo Sapiens
tcacactgacctggcagc

SEQ ID NO: 4695 - DNA, 18 bp, Homo Sapiens
cacactgacctggcagcg

SEQ ID NO: 4696 - DNA, 18 bp, Homo Sapiens
acactgacctggcagcgg

SEQ ID NO: 4697 - DNA, 18 bp, Homo Sapiens
cactgacctggcagcggg

SEQ ID NO: 4698 - DNA, 18 bp, Homo Sapiens
actgacctggcagcggga

SEQ ID NO: 4699 - DNA, 18 bp, Homo Sapiens
ctgacctggcagcgggat

SEQ ID NO: 4700 - DNA, 18 bp, Homo Sapiens
tgacctggcagcgggatg

SEQ ID NO: 4701 - DNA, 18 bp, Homo Sapiens
gacctggcagcgggatgg

SEQ ID NO: 4702 - DNA, 18 bp, Homo Sapiens
acctggcagcgggatggg

SEQ ID NO: 4703 - DNA, 18 bp, Homo Sapiens
cctggcagcgggatgggg

SEQ ID NO: 4704 - DNA, 18 bp, Homo Sapiens
ctggcagcgggatgggga

SEQ ID NO: 4705 - DNA, 18 bp, Homo Sapiens
tggcagcgggatggggag

SEQ ID NO: 4706 - DNA, 18 bp, Homo Sapiens
ggcagcgggatggggagg

SEQ ID NO: 4707 - DNA, 18 bp, Homo Sapiens
gcagcgggatggggagga

SEQ ID NO: 4708 - DNA, 18 bp, Homo Sapiens
cagcgggatggggaggac

SEQ ID NO: 4709 - DNA, 18 bp, Homo Sapiens
agcgggatggggaggacc

SEQ ID NO: 4710 - DNA, 18 bp, Homo Sapiens
gcgggatggggaggacca

SEQ ID NO: 4711 - DNA, 18 bp, Homo Sapiens
cgggatggggaggaccag

SEQ ID NO: 4712 - DNA, 18 bp, Homo Sapiens
gggatggggaggaccaga

SEQ ID NO: 4713 - DNA, 18 bp, Homo Sapiens
ggatggggaggaccagac

SEQ ID NO: 4714 - DNA, 18 bp, Homo Sapiens
gatggggaggaccagacc

SEQ ID NO: 4715 - DNA, 18 bp, Homo Sapiens
atggggaggaccagaccc

SEQ ID NO: 4716 - DNA, 18 bp, Homo Sapiens
tggggaggaccagaccca

SEQ ID NO: 4717 - DNA, 18 bp, Homo Sapiens
ggggaggaccagacccag

SEQ ID NO: 4718 - DNA, 18 bp, Homo Sapiens
gggaggaccagacccagg

SEQ ID NO: 4719 - DNA, 18 bp, Homo Sapiens
ggaggaccagacccagga

SEQ ID NO: 4720 - DNA, 18 bp, Homo Sapiens
gaggaccagacccaggac

SEQ ID NO: 4721 - DNA, 18 bp, Homo Sapiens
aggaccagacccaggaca

SEQ ID NO: 4722 - DNA, 18 bp, Homo Sapiens
ggaccagacccaggacac

SEQ ID NO: 4723 - DNA, 18 bp, Homo Sapiens
gaccagacccaggacacg

SEQ ID NO: 4724 - DNA, 18 bp, Homo Sapiens
accagacccaggacacgg

SEQ ID NO: 4725 - DNA, 18 bp, Homo Sapiens
ccagacccaggacacgga

SEQ ID NO: 4726 - DNA, 18 bp, Homo Sapiens
cagacccaggacacggag

SEQ ID NO: 4727 - DNA, 18 bp, Homo Sapiens
agacccaggacacggagc

SEQ ID NO: 4728 - DNA, 18 bp, Homo Sapiens
gacccaggacacggagct

SEQ ID NO: 4729 - DNA, 18 bp, Homo Sapiens
acccaggacacggagctc

SEQ ID NO: 4730 - DNA, 18 bp, Homo Sapiens
cccaggacacggagctcg

SEQ ID NO: 4731 - DNA, 18 bp, Homo Sapiens
ccaggacacggagctcgt

SEQ ID NO: 4732 - DNA, 18 bp, Homo Sapiens
caggacacggagctcgtg

SEQ ID NO: 4733 - DNA, 18 bp, Homo Sapiens
aggacacggagctcgtgg

SEQ ID NO: 4734 - DNA, 18 bp, Homo Sapiens
ggacacggagctcgtgga

SEQ ID NO: 4735 - DNA, 18 bp, Homo Sapiens
gacacggagctcgtggag

SEQ ID NO: 4736 - DNA, 18 bp, Homo Sapiens
acacggagctcgtggaga

SEQ ID NO: 4737 - DNA, 18 bp, Homo Sapiens
cacggagctcgtggagac

SEQ ID NO: 4738 - DNA, 18 bp, Homo Sapiens
acggagctcgtggagacc

SEQ ID NO: 4739 - DNA, 18 bp, Homo Sapiens
cggagctcgtggagacca

SEQ ID NO: 4740 - DNA, 18 bp, Homo Sapiens
ggagctcgtggagaccag

SEQ ID NO: 4741 - DNA, 18 bp, Homo Sapiens
gagctcgtggagaccagg

SEQ ID NO: 4742 - DNA, 18 bp, Homo Sapiens
agctcgtggagaccaggc

SEQ ID NO: 4743 - DNA, 18 bp, Homo Sapiens
gctcgtggagaccaggcc

SEQ ID NO: 4744 - DNA, 18 bp, Homo Sapiens
ctcgtggagaccaggcct

SEQ ID NO: 4745 - DNA, 18 bp, Homo Sapiens
tcgtggagaccaggcctg

SEQ ID NO: 4746 - DNA, 18 bp, Homo Sapiens
cgtggagaccaggcctgc

SEQ ID NO: 4747 - DNA, 18 bp, Homo Sapiens
gtggagaccaggcctgca

SEQ ID NO: 4748 - DNA, 18 bp, Homo Sapiens
tggagaccaggcctgcag

SEQ ID NO: 4749 - DNA, 18 bp, Homo Sapiens
ggagaccaggcctgcagg

SEQ ID NO: 4750 - DNA, 18 bp, Homo Sapiens
gagaccaggcctgcaggg

SEQ ID NO: 4751 - DNA, 18 bp, Homo Sapiens
agaccaggcctgcagggg

SEQ ID NO: 4752 - DNA, 18 bp, Homo Sapiens
gaccaggcctgcagggga

SEQ ID NO: 4753 - DNA, 18 bp, Homo Sapiens
accaggcctgcaggggat

SEQ ID NO: 4754 - DNA, 18 bp, Homo Sapiens
ccaggcctgcaggggatg

SEQ ID NO: 4755 - DNA, 18 bp, Homo Sapiens
caggcctgcaggggatgg

SEQ ID NO: 4756 - DNA, 18 bp, Homo Sapiens
aggcctgcaggggatgga

SEQ ID NO: 4757 - DNA, 18 bp, Homo Sapiens
ggcctgcaggggatggaa

SEQ ID NO: 4758 - DNA, 18 bp, Homo Sapiens
gcctgcaggggatggaac

SEQ ID NO: 4759 - DNA, 18 bp, Homo Sapiens
cctgcaggggatggaacc

SEQ ID NO: 4760 - DNA, 18 bp, Homo Sapiens
ctgcaggggatggaacct

SEQ ID NO: 4761 - DNA, 18 bp, Homo Sapiens
gcaggggatggaaccttc

SEQ ID NO: 4762 - DNA, 18 bp, Homo Sapiens
caggggatggaaccttcc

SEQ ID NO: 4763 - DNA, 18 bp, Homo Sapiens
ggggatggaaccttccag

SEQ ID NO: 4764 - DNA, 18 bp, Homo Sapiens
accttccagaagtgggcg

SEQ ID NO: 4765 - DNA, 18 bp, Homo Sapiens
ccttccagaagtgggcgg

SEQ ID NO: 4766 - DNA, 18 bp, Homo Sapiens
cttccagaagtgggcggc

SEQ ID NO: 4767 - DNA, 18 bp, Homo Sapiens
ttccagaagtgggcggct

SEQ ID NO: 4768 - DNA, 18 bp, Homo Sapiens
tccagaagtgggcggctg

SEQ ID NO: 4769 - DNA, 18 bp, Homo Sapiens
ccagaagtgggcggctgt

SEQ ID NO: 4770 - DNA, 18 bp, Homo Sapiens
cagaagtgggcggctgtg

SEQ ID NO: 4771 - DNA, 18 bp, Homo Sapiens
agaagtgggcggctgtgg

SEQ ID NO: 4772 - DNA, 18 bp, Homo Sapiens
gaagtgggcggctgtggt

SEQ ID NO: 4773 - DNA, 18 bp, Homo Sapiens
aagtgggcggctgtggtg

SEQ ID NO: 4774 - DNA, 18 bp, Homo Sapiens
agtgggcggctgtggtgg

SEQ ID NO: 4775 - DNA, 18 bp, Homo Sapiens
gtgggcggctgtggtggt

SEQ ID NO: 4776 - DNA, 18 bp, Homo Sapiens
tgggcggctgtggtggtg

SEQ ID NO: 4777 - DNA, 18 bp, Homo Sapiens
gggcggctgtggtggtgc

SEQ ID NO: 4778 - DNA, 18 bp, Homo Sapiens
ggcggctgtggtggtgcc

SEQ ID NO: 4779 - DNA, 18 bp, Homo Sapiens
gcggctgtggtggtgcct

SEQ ID NO: 4780 - DNA, 18 bp, Homo Sapiens
cggctgtggtggtgcctt

SEQ ID NO: 4781 - DNA, 18 bp, Homo Sapiens
ggctgtggtggtgccttc

SEQ ID NO: 4782 - DNA, 18 bp, Homo Sapiens
gctgtggtggtgccttct

SEQ ID NO: 4783 - DNA, 18 bp, Homo Sapiens
ctgtggtggtgccttctg

SEQ ID NO: 4784 - DNA, 18 bp, Homo Sapiens
tgtggtggtgccttctgg

SEQ ID NO: 4785 - DNA, 18 bp, Homo Sapiens
gtggtggtgccttctgga

SEQ ID NO: 4786 - DNA, 18 bp, Homo Sapiens
tggtggtgccttctggac

SEQ ID NO: 4787 - DNA, 18 bp, Homo Sapiens
ggtggtgccttctggaca

SEQ ID NO: 4788 - DNA, 18 bp, Homo Sapiens
gtggtgccttctggacag

SEQ ID NO: 4789 - DNA, 18 bp, Homo Sapiens
tggtgccttctggacagg

SEQ ID NO: 4790 - DNA, 18 bp, Homo Sapiens
ggtgccttctggacagga

SEQ ID NO: 4791 - DNA, 18 bp, Homo Sapiens
gtgccttctggacaggag

SEQ ID NO: 4792 - DNA, 18 bp, Homo Sapiens
tgccttctggacaggagc

SEQ ID NO: 4793 - DNA, 18 bp, Homo Sapiens
gccttctggacaggagca

SEQ ID NO: 4794 - DNA, 18 bp, Homo Sapiens
ccttctggacaggagcag

SEQ ID NO: 4795 - DNA, 18 bp, Homo Sapiens
acacctgccatgtgcagc

SEQ ID NO: 4796 - DNA, 18 bp, Homo Sapiens
cacctgccatgtgcagca

SEQ ID NO: 4797 - DNA, 18 bp, Homo Sapiens
cctgccatgtgcagcatg

SEQ ID NO: 4798 - DNA, 18 bp, Homo Sapiens
gccatgtgcagcatgagg

SEQ ID NO: 4799 - DNA, 18 bp, Homo Sapiens
ccatgtgcagcatgaggg

SEQ ID NO: 4800 - DNA, 18 bp, Homo Sapiens
gcagcatgagggtttgcc

SEQ ID NO: 4801 - DNA, 18 bp, Homo Sapiens
cagcatgagggtttgccc

SEQ ID NO: 4802 - DNA, 18 bp, Homo Sapiens
tgagggtttgcccaagcc

SEQ ID NO: 4803 - DNA, 18 bp, Homo Sapiens
gagggtttgcccaagccc

SEQ ID NO: 4804 - DNA, 18 bp, Homo Sapiens
agggtttgcccaagcccc

SEQ ID NO: 4805 - DNA, 18 bp, Homo Sapiens
gggtttgcccaagcccct

SEQ ID NO: 4806 - DNA, 18 bp, Homo Sapiens
ggtttgcccaagcccctc

SEQ ID NO: 4807 - DNA, 18 bp, Homo Sapiens
gtttgcccaagcccctca

SEQ ID NO: 4808 - DNA, 18 bp, Homo Sapiens
tttgcccaagcccctcac

SEQ ID NO: 4809 - DNA, 18 bp, Homo Sapiens
ttgcccaagcccctcacc

SEQ ID NO: 4810 - DNA, 18 bp, Homo Sapiens
tgcccaagcccctcaccc

SEQ ID NO: 4811 - DNA, 18 bp, Homo Sapiens
gcccaagcccctcaccct

SEQ ID NO: 4812 - DNA, 18 bp, Homo Sapiens
cccaagcccctcaccctg

SEQ ID NO: 4813 - DNA, 18 bp, Homo Sapiens
ccaagcccctcaccctga

SEQ ID NO: 4814 - DNA, 18 bp, Homo Sapiens
caagcccctcaccctgag

SEQ ID NO: 4815 - DNA, 18 bp, Homo Sapiens
aagcccctcaccctgaga

SEQ ID NO: 4816 - DNA, 18 bp, Homo Sapiens
agcccctcaccctgagat

SEQ ID NO: 4817 - DNA, 18 bp, Homo Sapiens
gcccctcaccctgagatg

SEQ ID NO: 4818 - DNA, 18 bp, Homo Sapiens
cccctcaccctgagatgg

SEQ ID NO: 4819 - DNA, 18 bp, Homo Sapiens
ccctcaccctgagatggg

SEQ ID NO: 4820 - DNA, 18 bp, Homo Sapiens
cctcaccctgagatggga

SEQ ID NO: 4821 - DNA, 18 bp, Homo Sapiens
ctcaccctgagatgggag

SEQ ID NO: 4822 - DNA, 18 bp, Homo Sapiens
tcaccctgagatgggagc

SEQ ID NO: 4823 - DNA, 18 bp, Homo Sapiens
caccctgagatgggagcc

SEQ ID NO: 4824 - DNA, 18 bp, Homo Sapiens
accctgagatgggagccg

SEQ ID NO: 4825 - DNA, 18 bp, Homo Sapiens
ccctgagatgggagccgt

SEQ ID NO: 4826 - DNA, 18 bp, Homo Sapiens
cctgagatgggagccgtc

SEQ ID NO: 4827 - DNA, 18 bp, Homo Sapiens
ctgagatgggagccgtct

SEQ ID NO: 4828 - DNA, 18 bp, Homo Sapiens
gagatgggagccgtcttc

SEQ ID NO: 4829 - DNA, 18 bp, Homo Sapiens
agatgggagccgtcttcc

SEQ ID NO: 4830 - DNA, 18 bp, Homo Sapiens
gatgggagccgtcttccc

SEQ ID NO: 4831 - DNA, 18 bp, Homo Sapiens
atgggagccgtcttccca

SEQ ID NO: 4832 - DNA, 18 bp, Homo Sapiens
tgggagccgtcttcccag

SEQ ID NO: 4833 - DNA, 18 bp, Homo Sapiens
gggagccgtcttcccagc

SEQ ID NO: 4834 - DNA, 18 bp, Homo Sapiens
ggagccgtcttcccagcc

SEQ ID NO: 4835 - DNA, 18 bp, Homo Sapiens
gagccgtcttcccagccc

SEQ ID NO: 4836 - DNA, 18 bp, Homo Sapiens
agccgtcttcccagccca

SEQ ID NO: 4837 - DNA, 18 bp, Homo Sapiens
gccgtcttcccagcccac

SEQ ID NO: 4838 - DNA, 18 bp, Homo Sapiens
ccgtcttcccagcccacc

SEQ ID NO: 4839 - DNA, 18 bp, Homo Sapiens
cgtcttcccagcccacca

SEQ ID NO: 4840 - DNA, 18 bp, Homo Sapiens
gtcttcccagcccaccat

SEQ ID NO: 4841 - DNA, 18 bp, Homo Sapiens
tcttcccagcccaccatc

SEQ ID NO: 4842 - DNA, 18 bp, Homo Sapiens
cttcccagcccaccatcc

SEQ ID NO: 4843 - DNA, 18 bp, Homo Sapiens
ttcccagcccaccatccc

SEQ ID NO: 4844 - DNA, 18 bp, Homo Sapiens
tcccagcccaccatcccc

SEQ ID NO: 4845 - DNA, 18 bp, Homo Sapiens
cccagcccaccatcccca

SEQ ID NO: 4846 - DNA, 18 bp, Homo Sapiens
ccagcccaccatccccat

SEQ ID NO: 4847 - DNA, 18 bp, Homo Sapiens
cagcccaccatccccatc

SEQ ID NO: 4848 - DNA, 18 bp, Homo Sapiens
agcccaccatccccatcg

SEQ ID NO: 4849 - DNA, 18 bp, Homo Sapiens
gcccaccatccccatcgt

SEQ ID NO: 4850 - DNA, 18 bp, Homo Sapiens
cccaccatccccatcgtg

SEQ ID NO: 4851 - DNA, 18 bp, Homo Sapiens
ccaccatccccatcgtgg

SEQ ID NO: 4852 - DNA, 18 bp, Homo Sapiens
caccatccccatcgtggg

SEQ ID NO: 4853 - DNA, 18 bp, Homo Sapiens
accatccccatcgtgggc

SEQ ID NO: 4854 - DNA, 18 bp, Homo Sapiens
ccatccccatcgtgggca

SEQ ID NO: 4855 - DNA, 18 bp, Homo Sapiens
catccccatcgtgggcat

SEQ ID NO: 4856 - DNA, 18 bp, Homo Sapiens
atccccatcgtgggcatc

SEQ ID NO: 4857 - DNA, 18 bp, Homo Sapiens
tccccatcgtgggcatca

SEQ ID NO: 4858 - DNA, 18 bp, Homo Sapiens
ccccatcgtgggcatcat

SEQ ID NO: 4859 - DNA, 18 bp, Homo Sapiens
cgtgggcatcattgctgg

SEQ ID NO: 4860 - DNA, 18 bp, Homo Sapiens
gtgggcatcattgctggc

SEQ ID NO: 4861 - DNA, 18 bp, Homo Sapiens
tgggcatcattgctggcc

SEQ ID NO: 4862 - DNA, 18 bp, Homo Sapiens
gggcatcattgctggcct

SEQ ID NO: 4863 - DNA, 18 bp, Homo Sapiens
ggcatcattgctggcctg

SEQ ID NO: 4864 - DNA, 18 bp, Homo Sapiens
gcatcattgctggcctgg

SEQ ID NO: 4865 - DNA, 18 bp, Homo Sapiens
tcactggagctgtggtcg

SEQ ID NO: 4866 - DNA, 18 bp, Homo Sapiens
cactggagctgtggtcgc

SEQ ID NO: 4867 - DNA, 18 bp, Homo Sapiens
actggagctgtggtcgct

SEQ ID NO: 4868 - DNA, 18 bp, Homo Sapiens
ctggagctgtggtcgctg

SEQ ID NO: 4869 - DNA, 18 bp, Homo Sapiens
tggagctgtggtcgctgc

SEQ ID NO: 4870 - DNA, 18 bp, Homo Sapiens
ggagctgtggtcgctgct

SEQ ID NO: 4871 - DNA, 18 bp, Homo Sapiens
gagctgtggtcgctgctg

SEQ ID NO: 4872 - DNA, 18 bp, Homo Sapiens
agctgtggtcgctgctgt

SEQ ID NO: 4873 - DNA, 18 bp, Homo Sapiens
gctgtggtcgctgctgtg

SEQ ID NO: 4874 - DNA, 18 bp, Homo Sapiens
ctgtggtcgctgctgtga

SEQ ID NO: 4875 - DNA, 18 bp, Homo Sapiens
gtggtcgctgctgtgatg

SEQ ID NO: 4876 - DNA, 18 bp, Homo Sapiens
ggtcgctgctgtgatgtg

SEQ ID NO: 4877 - DNA, 18 bp, Homo Sapiens
gtcgctgctgtgatgtgg

SEQ ID NO: 4878 - DNA, 18 bp, Homo Sapiens
cgctgctgtgatgtggag

SEQ ID NO: 4879 - DNA, 18 bp, Homo Sapiens
gctgctgtgatgtggagg

SEQ ID NO: 4880 - DNA, 18 bp, Homo Sapiens
gctgtgatgtggaggagg

SEQ ID NO: 4881 - DNA, 18 bp, Homo Sapiens
gtggaggaggaagagctc

SEQ ID NO: 4882 - DNA, 18 bp, Homo Sapiens
ggaggaggaagagctcag

SEQ ID NO: 4883 - DNA, 18 bp, Homo Sapiens
ggagggagctactctcag

SEQ ID NO: 4884 - DNA, 18 bp, Homo Sapiens
gagggagctactctcagg

SEQ ID NO: 4885 - DNA, 18 bp, Homo Sapiens
agggagctactctcaggc

SEQ ID NO: 4886 - DNA, 18 bp, Homo Sapiens
gggagctactctcaggct

SEQ ID NO: 4887 - DNA, 18 bp, Homo Sapiens
ggagctactctcaggctg

SEQ ID NO: 4888 - DNA, 18 bp, Homo Sapiens
gagctactctcaggctgc

SEQ ID NO: 4889 - DNA, 18 bp, Homo Sapiens
ctctcaggctgcaagcag

SEQ ID NO: 4890 - DNA, 18 bp, Homo Sapiens
ctcaggctgcaagcagtg

SEQ ID NO: 4891 - DNA, 18 bp, Homo Sapiens
caggctgcaagcagtgac

SEQ ID NO: 4892 - DNA, 18 bp, Homo Sapiens
ggctgcaagcagtgacag

SEQ ID NO: 4893 - DNA, 18 bp, Homo Sapiens
gcaagcagtgacagtgcc

SEQ ID NO: 4894 - DNA, 18 bp, Homo Sapiens
caagcagtgacagtgccc

SEQ ID NO: 4895 - DNA, 18 bp, Homo Sapiens
agcagtgacagtgcccag

SEQ ID NO: 4896 - DNA, 18 bp, Homo Sapiens
gcagtgacagtgcccagg

SEQ ID NO: 4897 - DNA, 18 bp, Homo Sapiens
cagtgacagtgcccaggg

SEQ ID NO: 4898 - DNA, 18 bp, Homo Sapiens
agtgacagtgcccagggc

SEQ ID NO: 4899 - DNA, 18 bp, Homo Sapiens
gtgacagtgcccagggct

SEQ ID NO: 4900 - DNA, 18 bp, Homo Sapiens
tgacagtgcccagggctc

SEQ ID NO: 4901 - DNA, 18 bp, Homo Sapiens
gacagtgcccagggctct

SEQ ID NO: 4902 - DNA, 18 bp, Homo Sapiens
acagtgcccagggctctg

SEQ ID NO: 4903 - DNA, 18 bp, Homo Sapiens
cagtgcccagggctctga

SEQ ID NO: 4904 - DNA, 18 bp, Homo Sapiens
agtgcccagggctctgat

SEQ ID NO: 4905 - DNA, 18 bp, Homo Sapiens
gtgcccagggctctgatg

SEQ ID NO: 4906 - DNA, 18 bp, Homo Sapiens
tgcccagggctctgatgt

SEQ ID NO: 4907 - DNA, 18 bp, Homo Sapiens
gcccagggctctgatgtg

SEQ ID NO: 4908 - DNA, 18 bp, Homo Sapiens
cccagggctctgatgtgt

SEQ ID NO: 4909 - DNA, 18 bp, Homo Sapiens
ccagggctctgatgtgtc

SEQ ID NO: 4910 - DNA, 18 bp, Homo Sapiens
gacagctgccttgtgtgg

SEQ ID NO: 4911 - DNA, 18 bp, Homo Sapiens
acagctgccttgtgtggg

SEQ ID NO: 4912 - DNA, 18 bp, Homo Sapiens
cagctgccttgtgtggga

SEQ ID NO: 4913 - DNA, 18 bp, Homo Sapiens
agctgccttgtgtgggac

SEQ ID NO: 4914 - DNA, 18 bp, Homo Sapiens
gctgccttgtgtgggact

SEQ ID NO: 4915 - DNA, 18 bp, Homo Sapiens
ctgccttgtgtgggactg

SEQ ID NO: 4916 - DNA, 18 bp, Homo Sapiens
gccttgtgtgggactgag

SEQ ID NO: 4917 - DNA, 18 bp, Homo Sapiens
tgtgtgggactgagaggc

SEQ ID NO: 4918 - DNA, 18 bp, Homo Sapiens
gtgtgggactgagaggca

SEQ ID NO: 4919 - DNA, 18 bp, Homo Sapiens
gtgggactgagaggcaag

SEQ ID NO: 4920 - DNA, 18 bp, Homo Sapiens
gggactgagaggcaagag

SEQ ID NO: 4921 - DNA, 18 bp, Homo Sapiens
gttgttcctgcccttccc

SEQ ID NO: 4922 - DNA, 18 bp, Homo Sapiens
cctgcccttccctttgtg

SEQ ID NO: 4923 - DNA, 18 bp, Homo Sapiens
ggcacctgcatgtgtctg

SEQ ID NO: 4924 - DNA, 18 bp, Homo Sapiens
atgtgaggaggtggggag

SEQ ID NO: 4925 - DNA, 18 bp, Homo Sapiens
tgtgaggaggtggggaga

SEQ ID NO: 4926 - DNA, 18 bp, Homo Sapiens
gtgaggaggtggggagac

SEQ ID NO: 4927 - DNA, 18 bp, Homo Sapiens
tgaggaggtggggagacc

SEQ ID NO: 4928 - DNA, 18 bp, Homo Sapiens
gaggaggtggggagacca

SEQ ID NO: 4929 - DNA, 18 bp, Homo Sapiens
aggaggtggggagaccac

SEQ ID NO: 4930 - DNA, 18 bp, Homo Sapiens
ggaggtggggagaccacc

SEQ ID NO: 4931 - DNA, 18 bp, Homo Sapiens
gaggtggggagaccaccc

SEQ ID NO: 4932 - DNA, 18 bp, Homo Sapiens
aggtggggagaccacccc

SEQ ID NO: 4933 - DNA, 18 bp, Homo Sapiens
ggtggggagaccacccca

SEQ ID NO: 4934 - DNA, 18 bp, Homo Sapiens
gtggggagaccaccccac

SEQ ID NO: 4935 - DNA, 18 bp, Homo Sapiens
tggggagaccaccccacc

SEQ ID NO: 4936 - DNA, 18 bp, Homo Sapiens
ggggagaccaccccaccc

SEQ ID NO: 4937 - DNA, 18 bp, Homo Sapiens
gggagaccaccccacccc

SEQ ID NO: 4938 - DNA, 18 bp, Homo Sapiens
ggagaccaccccaccccc

SEQ ID NO: 4939 - DNA, 18 bp, Homo Sapiens
gagaccaccccaccccca

SEQ ID NO: 4940 - DNA, 18 bp, Homo Sapiens
agaccaccccacccccat

SEQ ID NO: 4941 - DNA, 18 bp, Homo Sapiens
gaccaccccacccccatg

SEQ ID NO: 4942 - DNA, 18 bp, Homo Sapiens
accaccccacccccatgt

SEQ ID NO: 4943 - DNA, 18 bp, Homo Sapiens
ccaccccacccccatgtc

SEQ ID NO: 4944 - DNA, 18 bp, Homo Sapiens
caccccacccccatgtcc

SEQ ID NO: 4945 - DNA, 18 bp, Homo Sapiens
accccacccccatgtcca

SEQ ID NO: 4946 - DNA, 18 bp, Homo Sapiens
ccccacccccatgtccac

SEQ ID NO: 4947 - DNA, 18 bp, Homo Sapiens
cccacccccatgtccacc

SEQ ID NO: 4948 - DNA, 18 bp, Homo Sapiens
ccacccccatgtccacca

SEQ ID NO: 4949 - DNA, 18 bp, Homo Sapiens
cacccccatgtccaccat

SEQ ID NO: 4950 - DNA, 18 bp, Homo Sapiens
acccccatgtccaccatg

SEQ ID NO: 4951 - DNA, 18 bp, Homo Sapiens
cccccatgtccaccatga

SEQ ID NO: 4952 - DNA, 18 bp, Homo Sapiens
ccccatgtccaccatgac

SEQ ID NO: 4953 - DNA, 18 bp, Homo Sapiens
cccatgtccaccatgacc

SEQ ID NO: 4954 - DNA, 18 bp, Homo Sapiens
ccatgtccaccatgaccc

SEQ ID NO: 4955 - DNA, 18 bp, Homo Sapiens
ccaccatgaccctcttcc

SEQ ID NO: 4956 - DNA, 18 bp, Homo Sapiens
caccatgaccctcttccc

SEQ ID NO: 4957 - DNA, 18 bp, Homo Sapiens
ccatgaccctcttcccac

SEQ ID NO: 4958 - DNA, 18 bp, Homo Sapiens
catgaccctcttcccacg

SEQ ID NO: 4959 - DNA, 18 bp, Homo Sapiens
atgaccctcttcccacgc

SEQ ID NO: 4960 - DNA, 18 bp, Homo Sapiens
tgaccctcttcccacgct

SEQ ID NO: 4961 - DNA, 18 bp, Homo Sapiens
gaccctcttcccacgctg

SEQ ID NO: 4962 - DNA, 18 bp, Homo Sapiens
accctcttcccacgctga

SEQ ID NO: 4963 - DNA, 18 bp, Homo Sapiens
ccctcttcccacgctgac

SEQ ID NO: 4964 - DNA, 18 bp, Homo Sapiens
cctcttcccacgctgacc

SEQ ID NO: 4965 - DNA, 18 bp, Homo Sapiens
ctcttcccacgctgacct

SEQ ID NO: 4966 - DNA, 18 bp, Homo Sapiens
tcttcccacgctgacctg

SEQ ID NO: 4967 - DNA, 18 bp, Homo Sapiens
cttcccacgctgacctgt

SEQ ID NO: 4968 - DNA, 18 bp, Homo Sapiens
ttcccacgctgacctgtg

SEQ ID NO: 4969 - DNA, 18 bp, Homo Sapiens
tcccacgctgacctgtgc

SEQ ID NO: 4970 - DNA, 18 bp, Homo Sapiens
cccacgctgacctgtgct

SEQ ID NO: 4971 - DNA, 18 bp, Homo Sapiens
ccacgctgacctgtgctc

SEQ ID NO: 4972 - DNA, 18 bp, Homo Sapiens
cacgctgacctgtgctcc

SEQ ID NO: 4973 - DNA, 18 bp, Homo Sapiens
acgctgacctgtgctccc

SEQ ID NO: 4974 - DNA, 18 bp, Homo Sapiens
cgctgacctgtgctccct

SEQ ID NO: 4975 - DNA, 18 bp, Homo Sapiens
gctgacctgtgctccctc

SEQ ID NO: 4976 - DNA, 18 bp, Homo Sapiens
ctgacctgtgctccctcc

SEQ ID NO: 4977 - DNA, 18 bp, Homo Sapiens
tgacctgtgctccctccc

SEQ ID NO: 4978 - DNA, 18 bp, Homo Sapiens
gacctgtgctccctcccc

SEQ ID NO: 4979 - DNA, 18 bp, Homo Sapiens
acctgtgctccctcccca

SEQ ID NO: 4980 - DNA, 18 bp, Homo Sapiens
cctgtgctccctccccaa

SEQ ID NO: 4981 - DNA, 18 bp, Homo Sapiens
ctgtgctccctccccaat

SEQ ID NO: 4982 - DNA, 18 bp, Homo Sapiens
tgtgctccctccccaatc

SEQ ID NO: 4983 - DNA, 18 bp, Homo Sapiens
gtgctccctccccaatca

SEQ ID NO: 4984 - DNA, 18 bp, Homo Sapiens
gctccctccccaatcatc

SEQ ID NO: 4985 - DNA, 18 bp, Homo Sapiens
cctgttccagagaggtgg

SEQ ID NO: 4986 - DNA, 18 bp, Homo Sapiens
ctgttccagagaggtggg

SEQ ID NO: 4987 - DNA, 18 bp, Homo Sapiens
tgttccagagaggtgggg

SEQ ID NO: 4988 - DNA, 18 bp, Homo Sapiens
gttccagagaggtggggc

SEQ ID NO: 4989 - DNA, 18 bp, Homo Sapiens
ttccagagaggtggggct

SEQ ID NO: 4990 - DNA, 18 bp, Homo Sapiens
tccagagaggtggggctg

SEQ ID NO: 4991 - DNA, 18 bp, Homo Sapiens
ccagagaggtggggctga

SEQ ID NO: 4992 - DNA, 18 bp, Homo Sapiens
cagagaggtggggctgag

SEQ ID NO: 4993 - DNA, 18 bp, Homo Sapiens
agagaggtggggctgagg

SEQ ID NO: 4994 - DNA, 18 bp, Homo Sapiens
gagaggtggggctgaggt

SEQ ID NO: 4995 - DNA, 18 bp, Homo Sapiens
agaggtggggctgaggtg

SEQ ID NO: 4996 - DNA, 18 bp, Homo Sapiens
gaggtggggctgaggtgt

SEQ ID NO: 4997 - DNA, 18 bp, Homo Sapiens
aggtggggctgaggtgtc

SEQ ID NO: 4998 - DNA, 18 bp, Homo Sapiens
ggtggggctgaggtgtct

SEQ ID NO: 4999 - DNA, 18 bp, Homo Sapiens
gtggggctgaggtgtctc

SEQ ID NO: 5000 - DNA, 18 bp, Homo Sapiens
tggggctgaggtgtctcc

SEQ ID NO: 5001 - DNA, 18 bp, Homo Sapiens
ggggctgaggtgtctcca

SEQ ID NO: 5002 - DNA, 18 bp, Homo Sapiens
gggctgaggtgtctccat

SEQ ID NO: 5003 - DNA, 18 bp, Homo Sapiens
ggctgaggtgtctccatc

SEQ ID NO: 5004 - DNA, 19 bp, Homo Sapiens
cagaagcagaggggtcagg

SEQ ID NO: 5005 - DNA, 19 bp, Homo Sapiens
agaagcagaggggtcaggg

SEQ ID NO: 5006 - DNA, 19 bp, Homo Sapiens
gaagcagaggggtcagggc

SEQ ID NO: 5007 - DNA, 19 bp, Homo Sapiens
aagcagaggggtcagggcg

SEQ ID NO: 5008 - DNA, 19 bp, Homo Sapiens
agcagaggggtcagggcga

SEQ ID NO: 5009 - DNA, 19 bp, Homo Sapiens
gcagaggggtcagggcgaa

SEQ ID NO: 5010 - DNA, 19 bp, Homo Sapiens
cagaggggtcagggcgaag

SEQ ID NO: 5011 - DNA, 19 bp, Homo Sapiens
agaggggtcagggcgaagt

SEQ ID NO: 5012 - DNA, 19 bp, Homo Sapiens
gaggggtcagggcgaagtc

SEQ ID NO: 5013 - DNA, 19 bp, Homo Sapiens
aggggtcagggcgaagtcc

SEQ ID NO: 5014 - DNA, 19 bp, Homo Sapiens
ggggtcagggcgaagtccc

SEQ ID NO: 5015 - DNA, 19 bp, Homo Sapiens
gggtcagggcgaagtccca

SEQ ID NO: 5016 - DNA, 19 bp, Homo Sapiens
ggtcagggcgaagtcccag

SEQ ID NO: 5017 - DNA, 19 bp, Homo Sapiens
gtcagggcgaagtcccagg

SEQ ID NO: 5018 - DNA, 19 bp, Homo Sapiens
tcagggcgaagtcccaggg

SEQ ID NO: 5019 - DNA, 19 bp, Homo Sapiens
cagggcgaagtcccagggc

SEQ ID NO: 5020 - DNA, 19 bp, Homo Sapiens
agggcgaagtcccagggcc

SEQ ID NO: 5021 - DNA, 19 bp, Homo Sapiens
gggcgaagtcccagggccc

SEQ ID NO: 5022 - DNA, 19 bp, Homo Sapiens
ggcgaagtcccagggcccc

SEQ ID NO: 5023 - DNA, 19 bp, Homo Sapiens
gcgaagtcccagggcccca

SEQ ID NO: 5024 - DNA, 19 bp, Homo Sapiens
cgaagtcccagggccccag

SEQ ID NO: 5025 - DNA, 19 bp, Homo Sapiens
gaagtcccagggccccagg

SEQ ID NO: 5026 - DNA, 19 bp, Homo Sapiens
aagtcccagggccccaggc

SEQ ID NO: 5027 - DNA, 19 bp, Homo Sapiens
agtcccagggccccaggcg

SEQ ID NO: 5028 - DNA, 19 bp, Homo Sapiens
gtcccagggccccaggcgt

SEQ ID NO: 5029 - DNA, 19 bp, Homo Sapiens
tcccagggccccaggcgtg

SEQ ID NO: 5030 - DNA, 19 bp, Homo Sapiens
cccagggccccaggcgtgg

SEQ ID NO: 5031 - DNA, 19 bp, Homo Sapiens
ccagggccccaggcgtggc

SEQ ID NO: 5032 - DNA, 19 bp, Homo Sapiens
cagggccccaggcgtggct

SEQ ID NO: 5033 - DNA, 19 bp, Homo Sapiens
agggccccaggcgtggctc

SEQ ID NO: 5034 - DNA, 19 bp, Homo Sapiens
gggccccaggcgtggctct

SEQ ID NO: 5035 - DNA, 19 bp, Homo Sapiens
ggccccaggcgtggctctc

SEQ ID NO: 5036 - DNA, 19 bp, Homo Sapiens
gccccaggcgtggctctca

SEQ ID NO: 5037 - DNA, 19 bp, Homo Sapiens
ccccaggcgtggctctcag

SEQ ID NO: 5038 - DNA, 19 bp, Homo Sapiens
cccaggcgtggctctcagg

SEQ ID NO: 5039 - DNA, 19 bp, Homo Sapiens
ccaggcgtggctctcaggg

SEQ ID NO: 5040 - DNA, 19 bp, Homo Sapiens
caggcgtggctctcagggt

SEQ ID NO: 5041 - DNA, 19 bp, Homo Sapiens
aggcgtggctctcagggtc

SEQ ID NO: 5042 - DNA, 19 bp, Homo Sapiens
ggcgtggctctcagggtct

SEQ ID NO: 5043 - DNA, 19 bp, Homo Sapiens
gcgtggctctcagggtctc

SEQ ID NO: 5044 - DNA, 19 bp, Homo Sapiens
cgtggctctcagggtctca

SEQ ID NO: 5045 - DNA, 19 bp, Homo Sapiens
gtggctctcagggtctcag

SEQ ID NO: 5046 - DNA, 19 bp, Homo Sapiens
tggctctcagggtctcagg

SEQ ID NO: 5047 - DNA, 19 bp, Homo Sapiens
ggctctcagggtctcaggc

SEQ ID NO: 5048 - DNA, 19 bp, Homo Sapiens
gctctcagggtctcaggcc

SEQ ID NO: 5049 - DNA, 19 bp, Homo Sapiens
ctctcagggtctcaggccc

SEQ ID NO: 5050 - DNA, 19 bp, Homo Sapiens
tctcagggtctcaggcccc

SEQ ID NO: 5051 - DNA, 19 bp, Homo Sapiens
ctcagggtctcaggccccg

SEQ ID NO: 5052 - DNA, 19 bp, Homo Sapiens
tcagggtctcaggccccga

SEQ ID NO: 5053 - DNA, 19 bp, Homo Sapiens
cagggtctcaggccccgaa

SEQ ID NO: 5054 - DNA, 19 bp, Homo Sapiens
agggtctcaggccccgaag

SEQ ID NO: 5055 - DNA, 19 bp, Homo Sapiens
gggtctcaggccccgaagg

SEQ ID NO: 5056 - DNA, 19 bp, Homo Sapiens
ggtctcaggccccgaaggc

SEQ ID NO: 5057 - DNA, 19 bp, Homo Sapiens
gtctcaggccccgaaggcg

SEQ ID NO: 5058 - DNA, 19 bp, Homo Sapiens
tctcaggccccgaaggcgg

SEQ ID NO: 5059 - DNA, 19 bp, Homo Sapiens
ctcaggccccgaaggcggt

SEQ ID NO: 5060 - DNA, 19 bp, Homo Sapiens
tcaggccccgaaggcggtg

SEQ ID NO: 5061 - DNA, 19 bp, Homo Sapiens
caggccccgaaggcggtgt

SEQ ID NO: 5062 - DNA, 19 bp, Homo Sapiens
aggccccgaaggcggtgta

SEQ ID NO: 5063 - DNA, 19 bp, Homo Sapiens
ggccccgaaggcggtgtat

SEQ ID NO: 5064 - DNA, 19 bp, Homo Sapiens
gccccgaaggcggtgtatg

SEQ ID NO: 5065 - DNA, 19 bp, Homo Sapiens
ccccgaaggcggtgtatgg

SEQ ID NO: 5066 - DNA, 19 bp, Homo Sapiens
cccgaaggcggtgtatgga

SEQ ID NO: 5067 - DNA, 19 bp, Homo Sapiens
ggcggtgtatggattgggg

SEQ ID NO: 5068 - DNA, 19 bp, Homo Sapiens
tggattggggagtcccagc

SEQ ID NO: 5069 - DNA, 19 bp, Homo Sapiens
ggattggggagtcccagcc

SEQ ID NO: 5070 - DNA, 19 bp, Homo Sapiens
gattggggagtcccagcct

SEQ ID NO: 5071 - DNA, 19 bp, Homo Sapiens
ttggggagtcccagccttg

SEQ ID NO: 5072 - DNA, 19 bp, Homo Sapiens
tggggagtcccagccttgg

SEQ ID NO: 5073 - DNA, 19 bp, Homo Sapiens
ggggagtcccagccttggg

SEQ ID NO: 5074 - DNA, 19 bp, Homo Sapiens
gggagtcccagccttgggg

SEQ ID NO: 5075 - DNA, 19 bp, Homo Sapiens
ggagtcccagccttgggga

SEQ ID NO: 5076 - DNA, 19 bp, Homo Sapiens
gagtcccagccttggggat

SEQ ID NO: 5077 - DNA, 19 bp, Homo Sapiens
gtcccagccttggggattc

SEQ ID NO: 5078 - DNA, 19 bp, Homo Sapiens
tcccagccttggggattcc

SEQ ID NO: 5079 - DNA, 19 bp, Homo Sapiens
cccagccttggggattccc

SEQ ID NO: 5080 - DNA, 19 bp, Homo Sapiens
ccagccttggggattcccc

SEQ ID NO: 5081 - DNA, 19 bp, Homo Sapiens
cagccttggggattcccca

SEQ ID NO: 5082 - DNA, 19 bp, Homo Sapiens
gccttggggattccccaac

SEQ ID NO: 5083 - DNA, 19 bp, Homo Sapiens
tggggattccccaactccg

SEQ ID NO: 5084 - DNA, 19 bp, Homo Sapiens
ggggattccccaactccgc

SEQ ID NO: 5085 - DNA, 19 bp, Homo Sapiens
gggattccccaactccgca

SEQ ID NO: 5086 - DNA, 19 bp, Homo Sapiens
ggattccccaactccgcag

SEQ ID NO: 5087 - DNA, 19 bp, Homo Sapiens
cctggatactcacgacgcg

SEQ ID NO: 5088 - DNA, 19 bp, Homo Sapiens
ctggatactcacgacgcgg

SEQ ID NO: 5089 - DNA, 19 bp, Homo Sapiens
ggatactcacgacgcggac

SEQ ID NO: 5090 - DNA, 19 bp, Homo Sapiens
gatactcacgacgcggacc

SEQ ID NO: 5091 - DNA, 19 bp, Homo Sapiens
atactcacgacgcggaccc

SEQ ID NO: 5092 - DNA, 19 bp, Homo Sapiens
tactcacgacgcggaccca

SEQ ID NO: 5093 - DNA, 19 bp, Homo Sapiens
actcacgacgcggacccag

SEQ ID NO: 5094 - DNA, 19 bp, Homo Sapiens
ctcacgacgcggacccagt

SEQ ID NO: 5095 - DNA, 19 bp, Homo Sapiens
tcacgacgcggacccagtt

SEQ ID NO: 5096 - DNA, 19 bp, Homo Sapiens
cacgacgcggacccagttc

SEQ ID NO: 5097 - DNA, 19 bp, Homo Sapiens
acgacgcggacccagttct

SEQ ID NO: 5098 - DNA, 19 bp, Homo Sapiens
cgacgcggacccagttctc

SEQ ID NO: 5099 - DNA, 19 bp, Homo Sapiens
gacgcggacccagttctca

SEQ ID NO: 5100 - DNA, 19 bp, Homo Sapiens
acgcggacccagttctcac

SEQ ID NO: 5101 - DNA, 19 bp, Homo Sapiens
cgcggacccagttctcact

SEQ ID NO: 5102 - DNA, 19 bp, Homo Sapiens
gcggacccagttctcactc

SEQ ID NO: 5103 - DNA, 19 bp, Homo Sapiens
cggacccagttctcactcc

SEQ ID NO: 5104 - DNA, 19 bp, Homo Sapiens
ggacccagttctcactccc

SEQ ID NO: 5105 - DNA, 19 bp, Homo Sapiens
cactcccattgggtgtcgg

SEQ ID NO: 5106 - DNA, 19 bp, Homo Sapiens
actcccattgggtgtcggg

SEQ ID NO: 5107 - DNA, 19 bp, Homo Sapiens
ctcccattgggtgtcgggt

SEQ ID NO: 5108 - DNA, 19 bp, Homo Sapiens
gggtgtcgggtttccagag

SEQ ID NO: 5109 - DNA, 19 bp, Homo Sapiens
ccaatcagtgtcgtcgcgg

SEQ ID NO: 5110 - DNA, 19 bp, Homo Sapiens
atcagtgtcgtcgcggtcg

SEQ ID NO: 5111 - DNA, 19 bp, Homo Sapiens
tcagtgtcgtcgcggtcgc

SEQ ID NO: 5112 - DNA, 19 bp, Homo Sapiens
cagtgtcgtcgcggtcgcg

SEQ ID NO: 5113 - DNA, 19 bp, Homo Sapiens
agtgtcgtcgcggtcgcgg

SEQ ID NO: 5114 - DNA, 19 bp, Homo Sapiens
gtgtcgtcgcggtcgcggt

SEQ ID NO: 5115 - DNA, 19 bp, Homo Sapiens
tgtcgtcgcggtcgcggtt

SEQ ID NO: 5116 - DNA, 19 bp, Homo Sapiens
gtcgtcgcggtcgcggttc

SEQ ID NO: 5117 - DNA, 19 bp, Homo Sapiens
tcgtcgcggtcgcggttct

SEQ ID NO: 5118 - DNA, 19 bp, Homo Sapiens
cgtcgcggtcgcggttcta

SEQ ID NO: 5119 - DNA, 19 bp, Homo Sapiens
gtcgcggtcgcggttctaa

SEQ ID NO: 5120 - DNA, 19 bp, Homo Sapiens
cgcggtcgcggttctaaag

SEQ ID NO: 5121 - DNA, 19 bp, Homo Sapiens
ctaaagtccgcacgcaccc

SEQ ID NO: 5122 - DNA, 19 bp, Homo Sapiens
aaagtccgcacgcacccac

SEQ ID NO: 5123 - DNA, 19 bp, Homo Sapiens
aagtccgcacgcacccacc

SEQ ID NO: 5124 - DNA, 19 bp, Homo Sapiens
agtccgcacgcacccaccg

SEQ ID NO: 5125 - DNA, 19 bp, Homo Sapiens
gtccgcacgcacccaccgg

SEQ ID NO: 5126 - DNA, 19 bp, Homo Sapiens
tccgcacgcacccaccggg

SEQ ID NO: 5127 - DNA, 19 bp, Homo Sapiens
ccgcacgcacccaccggga

SEQ ID NO: 5128 - DNA, 19 bp, Homo Sapiens
cgcacgcacccaccgggac

SEQ ID NO: 5129 - DNA, 19 bp, Homo Sapiens
gcacgcacccaccgggact

SEQ ID NO: 5130 - DNA, 19 bp, Homo Sapiens
cacgcacccaccgggactc

SEQ ID NO: 5131 - DNA, 19 bp, Homo Sapiens
acgcacccaccgggactca

SEQ ID NO: 5132 - DNA, 19 bp, Homo Sapiens
cgcacccaccgggactcag

SEQ ID NO: 5133 - DNA, 19 bp, Homo Sapiens
gcacccaccgggactcaga

SEQ ID NO: 5134 - DNA, 19 bp, Homo Sapiens
cacccaccgggactcagat

SEQ ID NO: 5135 - DNA, 19 bp, Homo Sapiens
cccaccgggactcagattc

SEQ ID NO: 5136 - DNA, 19 bp, Homo Sapiens
ccgggactcagattctccc

SEQ ID NO: 5137 - DNA, 19 bp, Homo Sapiens
cgggactcagattctcccc

SEQ ID NO: 5138 - DNA, 19 bp, Homo Sapiens
cagattctccccagacgcc

SEQ ID NO: 5139 - DNA, 19 bp, Homo Sapiens
agattctccccagacgccg

SEQ ID NO: 5140 - DNA, 19 bp, Homo Sapiens
gattctccccagacgccga

SEQ ID NO: 5141 - DNA, 19 bp, Homo Sapiens
attctccccagacgccgag

SEQ ID NO: 5142 - DNA, 19 bp, Homo Sapiens
ttctccccagacgccgagg

SEQ ID NO: 5143 - DNA, 19 bp, Homo Sapiens
tctccccagacgccgagga

SEQ ID NO: 5144 - DNA, 19 bp, Homo Sapiens
ctccccagacgccgaggat

SEQ ID NO: 5145 - DNA, 19 bp, Homo Sapiens
tccccagacgccgaggatg

SEQ ID NO: 5146 - DNA, 19 bp, Homo Sapiens
ccccagacgccgaggatgg

SEQ ID NO: 5147 - DNA, 19 bp, Homo Sapiens
cccagacgccgaggatggc

SEQ ID NO: 5148 - DNA, 19 bp, Homo Sapiens
ccagacgccgaggatggcc

SEQ ID NO: 5149 - DNA, 19 bp, Homo Sapiens
cagacgccgaggatggccg

SEQ ID NO: 5150 - DNA, 19 bp, Homo Sapiens
agacgccgaggatggccgt

SEQ ID NO: 5151 - DNA, 19 bp, Homo Sapiens
gacgccgaggatggccgtc

SEQ ID NO: 5152 - DNA, 19 bp, Homo Sapiens
acgccgaggatggccgtca

SEQ ID NO: 5153 - DNA, 19 bp, Homo Sapiens
cgccgaggatggccgtcat

SEQ ID NO: 5154 - DNA, 19 bp, Homo Sapiens
gccgaggatggccgtcatg

SEQ ID NO: 5155 - DNA, 19 bp, Homo Sapiens
ccgaggatggccgtcatgg

SEQ ID NO: 5156 - DNA, 19 bp, Homo Sapiens
cgaggatggccgtcatggc

SEQ ID NO: 5157 - DNA, 19 bp, Homo Sapiens
gaggatggccgtcatggcg

SEQ ID NO: 5158 - DNA, 19 bp, Homo Sapiens
aggatggccgtcatggcgc

SEQ ID NO: 5159 - DNA, 19 bp, Homo Sapiens
ggatggccgtcatggcgcc

SEQ ID NO: 5160 - DNA, 19 bp, Homo Sapiens
gatggccgtcatggcgccc

SEQ ID NO: 5161 - DNA, 19 bp, Homo Sapiens
atggccgtcatggcgcccc

SEQ ID NO: 5162 - DNA, 19 bp, Homo Sapiens
tggccgtcatggcgccccg

SEQ ID NO: 5163 - DNA, 19 bp, Homo Sapiens
ggccgtcatggcgccccga

SEQ ID NO: 5164 - DNA, 19 bp, Homo Sapiens
gccgtcatggcgccccgaa

SEQ ID NO: 5165 - DNA, 19 bp, Homo Sapiens
ccgtcatggcgccccgaac

SEQ ID NO: 5166 - DNA, 19 bp, Homo Sapiens
cgtcatggcgccccgaacc

SEQ ID NO: 5167 - DNA, 19 bp, Homo Sapiens
gtcatggcgccccgaaccc

SEQ ID NO: 5168 - DNA, 19 bp, Homo Sapiens
tcatggcgccccgaaccct

SEQ ID NO: 5169 - DNA, 19 bp, Homo Sapiens
catggcgccccgaaccctc

SEQ ID NO: 5170 - DNA, 19 bp, Homo Sapiens
atggcgccccgaaccctcg

SEQ ID NO: 5171 - DNA, 19 bp, Homo Sapiens
tggcgccccgaaccctcgt

SEQ ID NO: 5172 - DNA, 19 bp, Homo Sapiens
ggcgccccgaaccctcgtc

SEQ ID NO: 5173 - DNA, 19 bp, Homo Sapiens
gcgccccgaaccctcgtcc

SEQ ID NO: 5174 - DNA, 19 bp, Homo Sapiens
cgccccgaaccctcgtcct

SEQ ID NO: 5175 - DNA, 19 bp, Homo Sapiens
gccccgaaccctcgtcctg

SEQ ID NO: 5176 - DNA, 19 bp, Homo Sapiens
ccccgaaccctcgtcctgc

SEQ ID NO: 5177 - DNA, 19 bp, Homo Sapiens
cccgaaccctcgtcctgct

SEQ ID NO: 5178 - DNA, 19 bp, Homo Sapiens
ccgaaccctcgtcctgcta

SEQ ID NO: 5179 - DNA, 19 bp, Homo Sapiens
cgaaccctcgtcctgctac

SEQ ID NO: 5180 - DNA, 19 bp, Homo Sapiens
ccctcgtcctgctactctc

SEQ ID NO: 5181 - DNA, 19 bp, Homo Sapiens
cctcgtcctgctactctcg

SEQ ID NO: 5182 - DNA, 19 bp, Homo Sapiens
ctcgtcctgctactctcgg

SEQ ID NO: 5183 - DNA, 19 bp, Homo Sapiens
tcgtcctgctactctcggg

SEQ ID NO: 5184 - DNA, 19 bp, Homo Sapiens
cgtcctgctactctcgggg

SEQ ID NO: 5185 - DNA, 19 bp, Homo Sapiens
gtcctgctactctcggggg

SEQ ID NO: 5186 - DNA, 19 bp, Homo Sapiens
tcctgctactctcgggggc

SEQ ID NO: 5187 - DNA, 19 bp, Homo Sapiens
cctgctactctcgggggct

SEQ ID NO: 5188 - DNA, 19 bp, Homo Sapiens
ctgctactctcgggggctc

SEQ ID NO: 5189 - DNA, 19 bp, Homo Sapiens
tgctactctcgggggctct

SEQ ID NO: 5190 - DNA, 19 bp, Homo Sapiens
gctactctcgggggctctg

SEQ ID NO: 5191 - DNA, 19 bp, Homo Sapiens
ctactctcgggggctctgg

SEQ ID NO: 5192 - DNA, 19 bp, Homo Sapiens
tactctcgggggctctggc

SEQ ID NO: 5193 - DNA, 19 bp, Homo Sapiens
actctcgggggctctggcc

SEQ ID NO: 5194 - DNA, 19 bp, Homo Sapiens
ctctcgggggctctggccc

SEQ ID NO: 5195 - DNA, 19 bp, Homo Sapiens
tctcgggggctctggccct

SEQ ID NO: 5196 - DNA, 19 bp, Homo Sapiens
ctcgggggctctggccctg

SEQ ID NO: 5197 - DNA, 19 bp, Homo Sapiens
tcgggggctctggccctga

SEQ ID NO: 5198 - DNA, 19 bp, Homo Sapiens
cgggggctctggccctgac

SEQ ID NO: 5199 - DNA, 19 bp, Homo Sapiens
gggggctctggccctgacc

SEQ ID NO: 5200 - DNA, 19 bp, Homo Sapiens
ggggctctggccctgaccc

SEQ ID NO: 5201 - DNA, 19 bp, Homo Sapiens
gggctctggccctgaccca

SEQ ID NO: 5202 - DNA, 19 bp, Homo Sapiens
ggctctggccctgacccag

SEQ ID NO: 5203 - DNA, 19 bp, Homo Sapiens
gctctggccctgacccaga

SEQ ID NO: 5204 - DNA, 19 bp, Homo Sapiens
ctctggccctgacccagac

SEQ ID NO: 5205 - DNA, 19 bp, Homo Sapiens
tctggccctgacccagacc

SEQ ID NO: 5206 - DNA, 19 bp, Homo Sapiens
ctggccctgacccagacct

SEQ ID NO: 5207 - DNA, 19 bp, Homo Sapiens
tggccctgacccagacctg

SEQ ID NO: 5208 - DNA, 19 bp, Homo Sapiens
ggccctgacccagacctgg

SEQ ID NO: 5209 - DNA, 19 bp, Homo Sapiens
gccctgacccagacctggg

SEQ ID NO: 5210 - DNA, 19 bp, Homo Sapiens
ccctgacccagacctgggc

SEQ ID NO: 5211 - DNA, 19 bp, Homo Sapiens
cctgacccagacctgggcg

SEQ ID NO: 5212 - DNA, 19 bp, Homo Sapiens
ctgacccagacctgggcgg

SEQ ID NO: 5213 - DNA, 19 bp, Homo Sapiens
tgacccagacctgggcggg

SEQ ID NO: 5214 - DNA, 19 bp, Homo Sapiens
gacccagacctgggcgggc

SEQ ID NO: 5215 - DNA, 19 bp, Homo Sapiens
acccagacctgggcgggct

SEQ ID NO: 5216 - DNA, 19 bp, Homo Sapiens
cccagacctgggcgggctc

SEQ ID NO: 5217 - DNA, 19 bp, Homo Sapiens
ccagacctgggcgggctct

SEQ ID NO: 5218 - DNA, 19 bp, Homo Sapiens
cagacctgggcgggctctc

SEQ ID NO: 5219 - DNA, 19 bp, Homo Sapiens
agacctgggcgggctctca

SEQ ID NO: 5220 - DNA, 19 bp, Homo Sapiens
gacctgggcgggctctcac

SEQ ID NO: 5221 - DNA, 19 bp, Homo Sapiens
acctgggcgggctctcact

SEQ ID NO: 5222 - DNA, 19 bp, Homo Sapiens
cctgggcgggctctcactc

SEQ ID NO: 5223 - DNA, 19 bp, Homo Sapiens
ctgggcgggctctcactcc

SEQ ID NO: 5224 - DNA, 19 bp, Homo Sapiens
tgggcgggctctcactcca

SEQ ID NO: 5225 - DNA, 19 bp, Homo Sapiens
gggcgggctctcactccat

SEQ ID NO: 5226 - DNA, 19 bp, Homo Sapiens
ggcgggctctcactccatg

SEQ ID NO: 5227 - DNA, 19 bp, Homo Sapiens
gcgggctctcactccatga

SEQ ID NO: 5228 - DNA, 19 bp, Homo Sapiens
cgggctctcactccatgag

SEQ ID NO: 5229 - DNA, 19 bp, Homo Sapiens
gggctctcactccatgagg

SEQ ID NO: 5230 - DNA, 19 bp, Homo Sapiens
cttcacatccgtgtcccgg

SEQ ID NO: 5231 - DNA, 19 bp, Homo Sapiens
ttcacatccgtgtcccggc

SEQ ID NO: 5232 - DNA, 19 bp, Homo Sapiens
tcacatccgtgtcccggcc

SEQ ID NO: 5233 - DNA, 19 bp, Homo Sapiens
cacatccgtgtcccggccc

SEQ ID NO: 5234 - DNA, 19 bp, Homo Sapiens
acatccgtgtcccggcccg

SEQ ID NO: 5235 - DNA, 19 bp, Homo Sapiens
catccgtgtcccggcccgg

SEQ ID NO: 5236 - DNA, 19 bp, Homo Sapiens
atccgtgtcccggcccggc

SEQ ID NO: 5237 - DNA, 19 bp, Homo Sapiens
tccgtgtcccggcccggcc

SEQ ID NO: 5238 - DNA, 19 bp, Homo Sapiens
ccgtgtcccggcccggccg

SEQ ID NO: 5239 - DNA, 19 bp, Homo Sapiens
cgtgtcccggcccggccgc

SEQ ID NO: 5240 - DNA, 19 bp, Homo Sapiens
gtgtcccggcccggccgcg

SEQ ID NO: 5241 - DNA, 19 bp, Homo Sapiens
tgtcccggcccggccgcgg

SEQ ID NO: 5242 - DNA, 19 bp, Homo Sapiens
gtcccggcccggccgcggg

SEQ ID NO: 5243 - DNA, 19 bp, Homo Sapiens
tcccggcccggccgcgggg

SEQ ID NO: 5244 - DNA, 19 bp, Homo Sapiens
cccggcccggccgcgggga

SEQ ID NO: 5245 - DNA, 19 bp, Homo Sapiens
ccggcccggccgcggggag

SEQ ID NO: 5246 - DNA, 19 bp, Homo Sapiens
cggcccggccgcggggagc

SEQ ID NO: 5247 - DNA, 19 bp, Homo Sapiens
ggcccggccgcggggagcc

SEQ ID NO: 5248 - DNA, 19 bp, Homo Sapiens
gcccggccgcggggagccc

SEQ ID NO: 5249 - DNA, 19 bp, Homo Sapiens
cccggccgcggggagcccc

SEQ ID NO: 5250 - DNA, 19 bp, Homo Sapiens
ccggccgcggggagccccg

SEQ ID NO: 5251 - DNA, 19 bp, Homo Sapiens
cggccgcggggagccccgc

SEQ ID NO: 5252 - DNA, 19 bp, Homo Sapiens
ggccgcggggagccccgct

SEQ ID NO: 5253 - DNA, 19 bp, Homo Sapiens
gccgcggggagccccgctt

SEQ ID NO: 5254 - DNA, 19 bp, Homo Sapiens
ccgcggggagccccgcttc

SEQ ID NO: 5255 - DNA, 19 bp, Homo Sapiens
cgcggggagccccgcttca

SEQ ID NO: 5256 - DNA, 19 bp, Homo Sapiens
gcggggagccccgcttcat

SEQ ID NO: 5257 - DNA, 19 bp, Homo Sapiens
cggggagccccgcttcatc

SEQ ID NO: 5258 - DNA, 19 bp, Homo Sapiens
ggggagccccgcttcatcg

SEQ ID NO: 5259 - DNA, 19 bp, Homo Sapiens
gggagccccgcttcatcgc

SEQ ID NO: 5260 - DNA, 19 bp, Homo Sapiens
ggagccccgcttcatcgca

SEQ ID NO: 5261 - DNA, 19 bp, Homo Sapiens
gagccccgcttcatcgcag

SEQ ID NO: 5262 - DNA, 19 bp, Homo Sapiens
agccccgcttcatcgcagt

SEQ ID NO: 5263 - DNA, 19 bp, Homo Sapiens
gccccgcttcatcgcagtg

SEQ ID NO: 5264 - DNA, 19 bp, Homo Sapiens
ccccgcttcatcgcagtgg

SEQ ID NO: 5265 - DNA, 19 bp, Homo Sapiens
cccgcttcatcgcagtggg

SEQ ID NO: 5266 - DNA, 19 bp, Homo Sapiens
ccgcttcatcgcagtgggc

SEQ ID NO: 5267 - DNA, 19 bp, Homo Sapiens
cgcttcatcgcagtgggct

SEQ ID NO: 5268 - DNA, 19 bp, Homo Sapiens
catcgcagtgggctacgtg

SEQ ID NO: 5269 - DNA, 19 bp, Homo Sapiens
atcgcagtgggctacgtgg

SEQ ID NO: 5270 - DNA, 19 bp, Homo Sapiens
tcgcagtgggctacgtgga

SEQ ID NO: 5271 - DNA, 19 bp, Homo Sapiens
cgcagtgggctacgtggac

SEQ ID NO: 5272 - DNA, 19 bp, Homo Sapiens
gcagtgggctacgtggacg

SEQ ID NO: 5273 - DNA, 19 bp, Homo Sapiens
cagtgggctacgtggacga

SEQ ID NO: 5274 - DNA, 19 bp, Homo Sapiens
agtgggctacgtggacgac

SEQ ID NO: 5275 - DNA, 19 bp, Homo Sapiens
gtgggctacgtggacgaca

SEQ ID NO: 5276 - DNA, 19 bp, Homo Sapiens
tgggctacgtggacgacac

SEQ ID NO: 5277 - DNA, 19 bp, Homo Sapiens
gggctacgtggacgacacg

SEQ ID NO: 5278 - DNA, 19 bp, Homo Sapiens
ggctacgtggacgacacgc

SEQ ID NO: 5279 - DNA, 19 bp, Homo Sapiens
gctacgtggacgacacgca

SEQ ID NO: 5280 - DNA, 19 bp, Homo Sapiens
ctacgtggacgacacgcag

SEQ ID NO: 5281 - DNA, 19 bp, Homo Sapiens
cgtggacgacacgcagttc

SEQ ID NO: 5282 - DNA, 19 bp, Homo Sapiens
gtggacgacacgcagttcg

SEQ ID NO: 5283 - DNA, 19 bp, Homo Sapiens
ggacgacacgcagttcgtg

SEQ ID NO: 5284 - DNA, 19 bp, Homo Sapiens
gacgacacgcagttcgtgc

SEQ ID NO: 5285 - DNA, 19 bp, Homo Sapiens
acgacacgcagttcgtgcg

SEQ ID NO: 5286 - DNA, 19 bp, Homo Sapiens
cgacacgcagttcgtgcgg

SEQ ID NO: 5287 - DNA, 19 bp, Homo Sapiens
gacacgcagttcgtgcggt

SEQ ID NO: 5288 - DNA, 19 bp, Homo Sapiens
cacgcagttcgtgcggttc

SEQ ID NO: 5289 - DNA, 19 bp, Homo Sapiens
acgcagttcgtgcggttcg

SEQ ID NO: 5290 - DNA, 19 bp, Homo Sapiens
cgcagttcgtgcggttcga

SEQ ID NO: 5291 - DNA, 19 bp, Homo Sapiens
gcagttcgtgcggttcgac

SEQ ID NO: 5292 - DNA, 19 bp, Homo Sapiens
gttcgtgcggttcgacagc

SEQ ID NO: 5293 - DNA, 19 bp, Homo Sapiens
ttcgtgcggttcgacagcg

SEQ ID NO: 5294 - DNA, 19 bp, Homo Sapiens
tcgtgcggttcgacagcga

SEQ ID NO: 5295 - DNA, 19 bp, Homo Sapiens
cgtgcggttcgacagcgac

SEQ ID NO: 5296 - DNA, 19 bp, Homo Sapiens
gtgcggttcgacagcgacg

SEQ ID NO: 5297 - DNA, 19 bp, Homo Sapiens
tgcggttcgacagcgacgc

SEQ ID NO: 5298 - DNA, 19 bp, Homo Sapiens
gcggttcgacagcgacgcc

SEQ ID NO: 5299 - DNA, 19 bp, Homo Sapiens
cggttcgacagcgacgccg

SEQ ID NO: 5300 - DNA, 19 bp, Homo Sapiens
ggttcgacagcgacgccgc

SEQ ID NO: 5301 - DNA, 19 bp, Homo Sapiens
gttcgacagcgacgccgcg

SEQ ID NO: 5302 - DNA, 19 bp, Homo Sapiens
ttcgacagcgacgccgcga

SEQ ID NO: 5303 - DNA, 19 bp, Homo Sapiens
tcgacagcgacgccgcgag

SEQ ID NO: 5304 - DNA, 19 bp, Homo Sapiens
cgacagcgacgccgcgagc

SEQ ID NO: 5305 - DNA, 19 bp, Homo Sapiens
gacagcgacgccgcgagcc

SEQ ID NO: 5306 - DNA, 19 bp, Homo Sapiens
acagcgacgccgcgagcca

SEQ ID NO: 5307 - DNA, 19 bp, Homo Sapiens
cagcgacgccgcgagccag

SEQ ID NO: 5308 - DNA, 19 bp, Homo Sapiens
agcgacgccgcgagccaga

SEQ ID NO: 5309 - DNA, 19 bp, Homo Sapiens
gcgacgccgcgagccagag

SEQ ID NO: 5310 - DNA, 19 bp, Homo Sapiens
cgacgccgcgagccagagg

SEQ ID NO: 5311 - DNA, 19 bp, Homo Sapiens
gacgccgcgagccagagga

SEQ ID NO: 5312 - DNA, 19 bp, Homo Sapiens
acgccgcgagccagaggat

SEQ ID NO: 5313 - DNA, 19 bp, Homo Sapiens
cgccgcgagccagaggatg

SEQ ID NO: 5314 - DNA, 19 bp, Homo Sapiens
gccgcgagccagaggatgg

SEQ ID NO: 5315 - DNA, 19 bp, Homo Sapiens
ccgcgagccagaggatgga

SEQ ID NO: 5316 - DNA, 19 bp, Homo Sapiens
cgcgagccagaggatggag

SEQ ID NO: 5317 - DNA, 19 bp, Homo Sapiens
gcgagccagaggatggagc

SEQ ID NO: 5318 - DNA, 19 bp, Homo Sapiens
cgagccagaggatggagcc

SEQ ID NO: 5319 - DNA, 19 bp, Homo Sapiens
gagccagaggatggagccg

SEQ ID NO: 5320 - DNA, 19 bp, Homo Sapiens
agccagaggatggagccgc

SEQ ID NO: 5321 - DNA, 19 bp, Homo Sapiens
gccagaggatggagccgcg

SEQ ID NO: 5322 - DNA, 19 bp, Homo Sapiens
ccagaggatggagccgcgg

SEQ ID NO: 5323 - DNA, 19 bp, Homo Sapiens
cagaggatggagccgcggg

SEQ ID NO: 5324 - DNA, 19 bp, Homo Sapiens
agaggatggagccgcgggc

SEQ ID NO: 5325 - DNA, 19 bp, Homo Sapiens
gaggatggagccgcgggcg

SEQ ID NO: 5326 - DNA, 19 bp, Homo Sapiens
aggatggagccgcgggcgc

SEQ ID NO: 5327 - DNA, 19 bp, Homo Sapiens
ggatggagccgcgggcgcc

SEQ ID NO: 5328 - DNA, 19 bp, Homo Sapiens
gatggagccgcgggcgccg

SEQ ID NO: 5329 - DNA, 19 bp, Homo Sapiens
atggagccgcgggcgccgt

SEQ ID NO: 5330 - DNA, 19 bp, Homo Sapiens
tggagccgcgggcgccgtg

SEQ ID NO: 5331 - DNA, 19 bp, Homo Sapiens
ggagccgcgggcgccgtgg

SEQ ID NO: 5332 - DNA, 19 bp, Homo Sapiens
gagccgcgggcgccgtgga

SEQ ID NO: 5333 - DNA, 19 bp, Homo Sapiens
agccgcgggcgccgtggat

SEQ ID NO: 5334 - DNA, 19 bp, Homo Sapiens
gccgcgggcgccgtggata

SEQ ID NO: 5335 - DNA, 19 bp, Homo Sapiens
ccgcgggcgccgtggatag

SEQ ID NO: 5336 - DNA, 19 bp, Homo Sapiens
cgcgggcgccgtggataga

SEQ ID NO: 5337 - DNA, 19 bp, Homo Sapiens
gcgggcgccgtggatagag

SEQ ID NO: 5338 - DNA, 19 bp, Homo Sapiens
cgggcgccgtggatagagc

SEQ ID NO: 5339 - DNA, 19 bp, Homo Sapiens
gggcgccgtggatagagca

SEQ ID NO: 5340 - DNA, 19 bp, Homo Sapiens
ggcgccgtggatagagcag

SEQ ID NO: 5341 - DNA, 19 bp, Homo Sapiens
gcgccgtggatagagcagg

SEQ ID NO: 5342 - DNA, 19 bp, Homo Sapiens
cgccgtggatagagcagga

SEQ ID NO: 5343 - DNA, 19 bp, Homo Sapiens
gccgtggatagagcaggag

SEQ ID NO: 5344 - DNA, 19 bp, Homo Sapiens
ccgtggatagagcaggagg

SEQ ID NO: 5345 - DNA, 19 bp, Homo Sapiens
cgtggatagagcaggaggg

SEQ ID NO: 5346 - DNA, 19 bp, Homo Sapiens
ggatagagcaggagggtcc

SEQ ID NO: 5347 - DNA, 19 bp, Homo Sapiens
gatagagcaggagggtccg

SEQ ID NO: 5348 - DNA, 19 bp, Homo Sapiens
atagagcaggagggtccgg

SEQ ID NO: 5349 - DNA, 19 bp, Homo Sapiens
tagagcaggagggtccgga

SEQ ID NO: 5350 - DNA, 19 bp, Homo Sapiens
agagcaggagggtccggag

SEQ ID NO: 5351 - DNA, 19 bp, Homo Sapiens
gagcaggagggtccggagt

SEQ ID NO: 5352 - DNA, 19 bp, Homo Sapiens
agcaggagggtccggagta

SEQ ID NO: 5353 - DNA, 19 bp, Homo Sapiens
gcaggagggtccggagtat

SEQ ID NO: 5354 - DNA, 19 bp, Homo Sapiens
ggagggtccggagtattgg

SEQ ID NO: 5355 - DNA, 19 bp, Homo Sapiens
gagggtccggagtattggg

SEQ ID NO: 5356 - DNA, 19 bp, Homo Sapiens
gggtccggagtattgggac

SEQ ID NO: 5357 - DNA, 19 bp, Homo Sapiens
ggtccggagtattgggacg

SEQ ID NO: 5358 - DNA, 19 bp, Homo Sapiens
gtccggagtattgggacgg

SEQ ID NO: 5359 - DNA, 19 bp, Homo Sapiens
tccggagtattgggacggg

SEQ ID NO: 5360 - DNA, 19 bp, Homo Sapiens
ccggagtattgggacgggg

SEQ ID NO: 5361 - DNA, 19 bp, Homo Sapiens
cggagtattgggacgggga

SEQ ID NO: 5362 - DNA, 19 bp, Homo Sapiens
ggagtattgggacggggag

SEQ ID NO: 5363 - DNA, 19 bp, Homo Sapiens
attgggacggggagacacg

SEQ ID NO: 5364 - DNA, 19 bp, Homo Sapiens
ttgggacggggagacacgg

SEQ ID NO: 5365 - DNA, 19 bp, Homo Sapiens
tgggacggggagacacgga

SEQ ID NO: 5366 - DNA, 19 bp, Homo Sapiens
gggacggggagacacggaa

SEQ ID NO: 5367 - DNA, 19 bp, Homo Sapiens
ggacggggagacacggaaa

SEQ ID NO: 5368 - DNA, 19 bp, Homo Sapiens
gacggggagacacggaaag

SEQ ID NO: 5369 - DNA, 19 bp, Homo Sapiens
cggggagacacggaaagtg

SEQ ID NO: 5370 - DNA, 19 bp, Homo Sapiens
ggcccactcacagactcac

SEQ ID NO: 5371 - DNA, 19 bp, Homo Sapiens
gcccactcacagactcacc

SEQ ID NO: 5372 - DNA, 19 bp, Homo Sapiens
cccactcacagactcaccg

SEQ ID NO: 5373 - DNA, 19 bp, Homo Sapiens
cagactcaccgagtggacc

SEQ ID NO: 5374 - DNA, 19 bp, Homo Sapiens
gactcaccgagtggacctg

SEQ ID NO: 5375 - DNA, 19 bp, Homo Sapiens
actcaccgagtggacctgg

SEQ ID NO: 5376 - DNA, 19 bp, Homo Sapiens
ctcaccgagtggacctggg

SEQ ID NO: 5377 - DNA, 19 bp, Homo Sapiens
tcaccgagtggacctgggg

SEQ ID NO: 5378 - DNA, 19 bp, Homo Sapiens
caccgagtggacctgggga

SEQ ID NO: 5379 - DNA, 19 bp, Homo Sapiens
accgagtggacctggggac

SEQ ID NO: 5380 - DNA, 19 bp, Homo Sapiens
ccgagtggacctggggacc

SEQ ID NO: 5381 - DNA, 19 bp, Homo Sapiens
cgagtggacctggggaccc

SEQ ID NO: 5382 - DNA, 19 bp, Homo Sapiens
gagtggacctggggaccct

SEQ ID NO: 5383 - DNA, 19 bp, Homo Sapiens
agtggacctggggaccctg

SEQ ID NO: 5384 - DNA, 19 bp, Homo Sapiens
gtggacctggggaccctgc

SEQ ID NO: 5385 - DNA, 19 bp, Homo Sapiens
tggacctggggaccctgcg

SEQ ID NO: 5386 - DNA, 19 bp, Homo Sapiens
ggacctggggaccctgcgc

SEQ ID NO: 5387 - DNA, 19 bp, Homo Sapiens
gacctggggaccctgcgcg

SEQ ID NO: 5388 - DNA, 19 bp, Homo Sapiens
acctggggaccctgcgcgg

SEQ ID NO: 5389 - DNA, 19 bp, Homo Sapiens
cctggggaccctgcgcggc

SEQ ID NO: 5390 - DNA, 19 bp, Homo Sapiens
ctggggaccctgcgcggct

SEQ ID NO: 5391 - DNA, 19 bp, Homo Sapiens
tggggaccctgcgcggcta

SEQ ID NO: 5392 - DNA, 19 bp, Homo Sapiens
ggggaccctgcgcggctac

SEQ ID NO: 5393 - DNA, 19 bp, Homo Sapiens
gggaccctgcgcggctact

SEQ ID NO: 5394 - DNA, 19 bp, Homo Sapiens
ggaccctgcgcggctacta

SEQ ID NO: 5395 - DNA, 19 bp, Homo Sapiens
gaccctgcgcggctactac

SEQ ID NO: 5396 - DNA, 19 bp, Homo Sapiens
accctgcgcggctactaca

SEQ ID NO: 5397 - DNA, 19 bp, Homo Sapiens
ccctgcgcggctactacaa

SEQ ID NO: 5398 - DNA, 19 bp, Homo Sapiens
cctgcgcggctactacaac

SEQ ID NO: 5399 - DNA, 19 bp, Homo Sapiens
ctgcgcggctactacaacc

SEQ ID NO: 5400 - DNA, 19 bp, Homo Sapiens
gcgcggctactacaaccag

SEQ ID NO: 5401 - DNA, 19 bp, Homo Sapiens
ctacaaccagagcgaggcc

SEQ ID NO: 5402 - DNA, 19 bp, Homo Sapiens
tacaaccagagcgaggccg

SEQ ID NO: 5403 - DNA, 19 bp, Homo Sapiens
acaaccagagcgaggccgg

SEQ ID NO: 5404 - DNA, 19 bp, Homo Sapiens
caaccagagcgaggccggt

SEQ ID NO: 5405 - DNA, 19 bp, Homo Sapiens
aaccagagcgaggccggtt

SEQ ID NO: 5406 - DNA, 19 bp, Homo Sapiens
accagagcgaggccggttc

SEQ ID NO: 5407 - DNA, 19 bp, Homo Sapiens
ccagagcgaggccggttct

SEQ ID NO: 5408 - DNA, 19 bp, Homo Sapiens
cagagcgaggccggttctc

SEQ ID NO: 5409 - DNA, 19 bp, Homo Sapiens
agagcgaggccggttctca

SEQ ID NO: 5410 - DNA, 19 bp, Homo Sapiens
gagcgaggccggttctcac

SEQ ID NO: 5411 - DNA, 19 bp, Homo Sapiens
agcgaggccggttctcaca

SEQ ID NO: 5412 - DNA, 19 bp, Homo Sapiens
gcgaggccggttctcacac

SEQ ID NO: 5413 - DNA, 19 bp, Homo Sapiens
cgaggccggttctcacacc

SEQ ID NO: 5414 - DNA, 19 bp, Homo Sapiens
gaggccggttctcacaccg

SEQ ID NO: 5415 - DNA, 19 bp, Homo Sapiens
aggccggttctcacaccgt

SEQ ID NO: 5416 - DNA, 19 bp, Homo Sapiens
ggccggttctcacaccgtc

SEQ ID NO: 5417 - DNA, 19 bp, Homo Sapiens
gccggttctcacaccgtcc

SEQ ID NO: 5418 - DNA, 19 bp, Homo Sapiens
ccggttctcacaccgtcca

SEQ ID NO: 5419 - DNA, 19 bp, Homo Sapiens
cggttctcacaccgtccag

SEQ ID NO: 5420 - DNA, 19 bp, Homo Sapiens
tgtatggctgcgacgtggg

SEQ ID NO: 5421 - DNA, 19 bp, Homo Sapiens
gtatggctgcgacgtgggg

SEQ ID NO: 5422 - DNA, 19 bp, Homo Sapiens
tatggctgcgacgtggggt

SEQ ID NO: 5423 - DNA, 19 bp, Homo Sapiens
atggctgcgacgtggggtc

SEQ ID NO: 5424 - DNA, 19 bp, Homo Sapiens
tggctgcgacgtggggtcg

SEQ ID NO: 5425 - DNA, 19 bp, Homo Sapiens
ggctgcgacgtggggtcgg

SEQ ID NO: 5426 - DNA, 19 bp, Homo Sapiens
gctgcgacgtggggtcgga

SEQ ID NO: 5427 - DNA, 19 bp, Homo Sapiens
ctgcgacgtggggtcggac

SEQ ID NO: 5428 - DNA, 19 bp, Homo Sapiens
tgcgacgtggggtcggact

SEQ ID NO: 5429 - DNA, 19 bp, Homo Sapiens
gcgacgtggggtcggactg

SEQ ID NO: 5430 - DNA, 19 bp, Homo Sapiens
cgacgtggggtcggactgg

SEQ ID NO: 5431 - DNA, 19 bp, Homo Sapiens
gacgtggggtcggactggc

SEQ ID NO: 5432 - DNA, 19 bp, Homo Sapiens
acgtggggtcggactggcg

SEQ ID NO: 5433 - DNA, 19 bp, Homo Sapiens
cgtggggtcggactggcgc

SEQ ID NO: 5434 - DNA, 19 bp, Homo Sapiens
gtggggtcggactggcgct

SEQ ID NO: 5435 - DNA, 19 bp, Homo Sapiens
tggggtcggactggcgctt

SEQ ID NO: 5436 - DNA, 19 bp, Homo Sapiens
ggggtcggactggcgcttc

SEQ ID NO: 5437 - DNA, 19 bp, Homo Sapiens
gggtcggactggcgcttcc

SEQ ID NO: 5438 - DNA, 19 bp, Homo Sapiens
ggtcggactggcgcttcct

SEQ ID NO: 5439 - DNA, 19 bp, Homo Sapiens
gtcggactggcgcttcctc

SEQ ID NO: 5440 - DNA, 19 bp, Homo Sapiens
tcggactggcgcttcctcc

SEQ ID NO: 5441 - DNA, 19 bp, Homo Sapiens
cggactggcgcttcctccg

SEQ ID NO: 5442 - DNA, 19 bp, Homo Sapiens
ggactggcgcttcctccgc

SEQ ID NO: 5443 - DNA, 19 bp, Homo Sapiens
gactggcgcttcctccgcg

SEQ ID NO: 5444 - DNA, 19 bp, Homo Sapiens
actggcgcttcctccgcgg

SEQ ID NO: 5445 - DNA, 19 bp, Homo Sapiens
ctggcgcttcctccgcggg

SEQ ID NO: 5446 - DNA, 19 bp, Homo Sapiens
tggcgcttcctccgcgggt

SEQ ID NO: 5447 - DNA, 19 bp, Homo Sapiens
ggcgcttcctccgcgggta

SEQ ID NO: 5448 - DNA, 19 bp, Homo Sapiens
gcgcttcctccgcgggtac

SEQ ID NO: 5449 - DNA, 19 bp, Homo Sapiens
cgcttcctccgcgggtacc

SEQ ID NO: 5450 - DNA, 19 bp, Homo Sapiens
gcttcctccgcgggtacca

SEQ ID NO: 5451 - DNA, 19 bp, Homo Sapiens
cttcctccgcgggtaccac

SEQ ID NO: 5452 - DNA, 19 bp, Homo Sapiens
ttcctccgcgggtaccacc

SEQ ID NO: 5453 - DNA, 19 bp, Homo Sapiens
tcctccgcgggtaccacca

SEQ ID NO: 5454 - DNA, 19 bp, Homo Sapiens
cctccgcgggtaccaccag

SEQ ID NO: 5455 - DNA, 19 bp, Homo Sapiens
ctccgcgggtaccaccagt

SEQ ID NO: 5456 - DNA, 19 bp, Homo Sapiens
tccgcgggtaccaccagta

SEQ ID NO: 5457 - DNA, 19 bp, Homo Sapiens
ccgcgggtaccaccagtac

SEQ ID NO: 5458 - DNA, 19 bp, Homo Sapiens
cgcgggtaccaccagtacg

SEQ ID NO: 5459 - DNA, 19 bp, Homo Sapiens
gcgggtaccaccagtacgc

SEQ ID NO: 5460 - DNA, 19 bp, Homo Sapiens
cgggtaccaccagtacgcc

SEQ ID NO: 5461 - DNA, 19 bp, Homo Sapiens
gggtaccaccagtacgcct

SEQ ID NO: 5462 - DNA, 19 bp, Homo Sapiens
ccaccagtacgcctacgac

SEQ ID NO: 5463 - DNA, 19 bp, Homo Sapiens
caccagtacgcctacgacg

SEQ ID NO: 5464 - DNA, 19 bp, Homo Sapiens
accagtacgcctacgacgg

SEQ ID NO: 5465 - DNA, 19 bp, Homo Sapiens
ccagtacgcctacgacggc

SEQ ID NO: 5466 - DNA, 19 bp, Homo Sapiens
cagtacgcctacgacggca

SEQ ID NO: 5467 - DNA, 19 bp, Homo Sapiens
gtacgcctacgacggcaag

SEQ ID NO: 5468 - DNA, 19 bp, Homo Sapiens
tacgcctacgacggcaagg

SEQ ID NO: 5469 - DNA, 19 bp, Homo Sapiens
acgcctacgacggcaagga

SEQ ID NO: 5470 - DNA, 19 bp, Homo Sapiens
cgcctacgacggcaaggat

SEQ ID NO: 5471 - DNA, 19 bp, Homo Sapiens
cgccctgaaagaggacctg

SEQ ID NO: 5472 - DNA, 19 bp, Homo Sapiens
gccctgaaagaggacctgc

SEQ ID NO: 5473 - DNA, 19 bp, Homo Sapiens
ccctgaaagaggacctgcg

SEQ ID NO: 5474 - DNA, 19 bp, Homo Sapiens
cctgaaagaggacctgcgc

SEQ ID NO: 5475 - DNA, 19 bp, Homo Sapiens
aggacctgcgctcttggac

SEQ ID NO: 5476 - DNA, 19 bp, Homo Sapiens
ggacctgcgctcttggacc

SEQ ID NO: 5477 - DNA, 19 bp, Homo Sapiens
gacctgcgctcttggaccg

SEQ ID NO: 5478 - DNA, 19 bp, Homo Sapiens
acctgcgctcttggaccgc

SEQ ID NO: 5479 - DNA, 19 bp, Homo Sapiens
cctgcgctcttggaccgcg

SEQ ID NO: 5480 - DNA, 19 bp, Homo Sapiens
ctgcgctcttggaccgcgg

SEQ ID NO: 5481 - DNA, 19 bp, Homo Sapiens
tgcgctcttggaccgcggc

SEQ ID NO: 5482 - DNA, 19 bp, Homo Sapiens
gcgctcttggaccgcggcg

SEQ ID NO: 5483 - DNA, 19 bp, Homo Sapiens
cgctcttggaccgcggcgg

SEQ ID NO: 5484 - DNA, 19 bp, Homo Sapiens
gctcttggaccgcggcgga

SEQ ID NO: 5485 - DNA, 19 bp, Homo Sapiens
ctcttggaccgcggcggac

SEQ ID NO: 5486 - DNA, 19 bp, Homo Sapiens
tcttggaccgcggcggaca

SEQ ID NO: 5487 - DNA, 19 bp, Homo Sapiens
cttggaccgcggcggacat

SEQ ID NO: 5488 - DNA, 19 bp, Homo Sapiens
ttggaccgcggcggacatg

SEQ ID NO: 5489 - DNA, 19 bp, Homo Sapiens
tggaccgcggcggacatgg

SEQ ID NO: 5490 - DNA, 19 bp, Homo Sapiens
ggaccgcggcggacatggc

SEQ ID NO: 5491 - DNA, 19 bp, Homo Sapiens
gaccgcggcggacatggca

SEQ ID NO: 5492 - DNA, 19 bp, Homo Sapiens
accgcggcggacatggcag

SEQ ID NO: 5493 - DNA, 19 bp, Homo Sapiens
ccgcggcggacatggcagc

SEQ ID NO: 5494 - DNA, 19 bp, Homo Sapiens
cgcggcggacatggcagct

SEQ ID NO: 5495 - DNA, 19 bp, Homo Sapiens
gcggcggacatggcagctc

SEQ ID NO: 5496 - DNA, 19 bp, Homo Sapiens
cggcggacatggcagctca

SEQ ID NO: 5497 - DNA, 19 bp, Homo Sapiens
ggcggacatggcagctcag

SEQ ID NO: 5498 - DNA, 19 bp, Homo Sapiens
gcggacatggcagctcaga

SEQ ID NO: 5499 - DNA, 19 bp, Homo Sapiens
cggacatggcagctcagac

SEQ ID NO: 5500 - DNA, 19 bp, Homo Sapiens
ggacatggcagctcagacc

SEQ ID NO: 5501 - DNA, 19 bp, Homo Sapiens
catggcagctcagaccacc

SEQ ID NO: 5502 - DNA, 19 bp, Homo Sapiens
ggcagctcagaccaccaag

SEQ ID NO: 5503 - DNA, 19 bp, Homo Sapiens
gcagctcagaccaccaagc

SEQ ID NO: 5504 - DNA, 19 bp, Homo Sapiens
ccaagcacaagtgggaggc

SEQ ID NO: 5505 - DNA, 19 bp, Homo Sapiens
caagcacaagtgggaggcg

SEQ ID NO: 5506 - DNA, 19 bp, Homo Sapiens
aagcacaagtgggaggcgg

SEQ ID NO: 5507 - DNA, 19 bp, Homo Sapiens
agcacaagtgggaggcggc

SEQ ID NO: 5508 - DNA, 19 bp, Homo Sapiens
gcacaagtgggaggcggcc

SEQ ID NO: 5509 - DNA, 19 bp, Homo Sapiens
cacaagtgggaggcggccc

SEQ ID NO: 5510 - DNA, 19 bp, Homo Sapiens
acaagtgggaggcggccca

SEQ ID NO: 5511 - DNA, 19 bp, Homo Sapiens
caagtgggaggcggcccat

SEQ ID NO: 5512 - DNA, 19 bp, Homo Sapiens
aagtgggaggcggcccatg

SEQ ID NO: 5513 - DNA, 19 bp, Homo Sapiens
agtgggaggcggcccatgt

SEQ ID NO: 5514 - DNA, 19 bp, Homo Sapiens
gtgggaggcggcccatgtg

SEQ ID NO: 5515 - DNA, 19 bp, Homo Sapiens
tgggaggcggcccatgtgg

SEQ ID NO: 5516 - DNA, 19 bp, Homo Sapiens
gggaggcggcccatgtggc

SEQ ID NO: 5517 - DNA, 19 bp, Homo Sapiens
ggaggcggcccatgtggcg

SEQ ID NO: 5518 - DNA, 19 bp, Homo Sapiens
gaggcggcccatgtggcgg

SEQ ID NO: 5519 - DNA, 19 bp, Homo Sapiens
aggcggcccatgtggcgga

SEQ ID NO: 5520 - DNA, 19 bp, Homo Sapiens
ggcggcccatgtggcggag

SEQ ID NO: 5521 - DNA, 19 bp, Homo Sapiens
gcggcccatgtggcggagc

SEQ ID NO: 5522 - DNA, 19 bp, Homo Sapiens
cggcccatgtggcggagca

SEQ ID NO: 5523 - DNA, 19 bp, Homo Sapiens
ggcccatgtggcggagcag

SEQ ID NO: 5524 - DNA, 19 bp, Homo Sapiens
gcccatgtggcggagcagt

SEQ ID NO: 5525 - DNA, 19 bp, Homo Sapiens
cccatgtggcggagcagtt

SEQ ID NO: 5526 - DNA, 19 bp, Homo Sapiens
ccatgtggcggagcagttg

SEQ ID NO: 5527 - DNA, 19 bp, Homo Sapiens
gtggcggagcagttgagag

SEQ ID NO: 5528 - DNA, 19 bp, Homo Sapiens
tggcggagcagttgagagc

SEQ ID NO: 5529 - DNA, 19 bp, Homo Sapiens
ggcggagcagttgagagcc

SEQ ID NO: 5530 - DNA, 19 bp, Homo Sapiens
gcggagcagttgagagcct

SEQ ID NO: 5531 - DNA, 19 bp, Homo Sapiens
tgagagcctacctggaggg

SEQ ID NO: 5532 - DNA, 19 bp, Homo Sapiens
gagagcctacctggagggc

SEQ ID NO: 5533 - DNA, 19 bp, Homo Sapiens
agagcctacctggagggca

SEQ ID NO: 5534 - DNA, 19 bp, Homo Sapiens
gagcctacctggagggcac

SEQ ID NO: 5535 - DNA, 19 bp, Homo Sapiens
agcctacctggagggcacg

SEQ ID NO: 5536 - DNA, 19 bp, Homo Sapiens
gcctacctggagggcacgt

SEQ ID NO: 5537 - DNA, 19 bp, Homo Sapiens
cctacctggagggcacgtg

SEQ ID NO: 5538 - DNA, 19 bp, Homo Sapiens
ctacctggagggcacgtgc

SEQ ID NO: 5539 - DNA, 19 bp, Homo Sapiens
tacctggagggcacgtgcg

SEQ ID NO: 5540 - DNA, 19 bp, Homo Sapiens
acctggagggcacgtgcgt

SEQ ID NO: 5541 - DNA, 19 bp, Homo Sapiens
cctggagggcacgtgcgtg

SEQ ID NO: 5542 - DNA, 19 bp, Homo Sapiens
ctggagggcacgtgcgtgg

SEQ ID NO: 5543 - DNA, 19 bp, Homo Sapiens
tggagggcacgtgcgtgga

SEQ ID NO: 5544 - DNA, 19 bp, Homo Sapiens
ggagggcacgtgcgtggag

SEQ ID NO: 5545 - DNA, 19 bp, Homo Sapiens
gagggcacgtgcgtggagt

SEQ ID NO: 5546 - DNA, 19 bp, Homo Sapiens
agggcacgtgcgtggagtg

SEQ ID NO: 5547 - DNA, 19 bp, Homo Sapiens
gggcacgtgcgtggagtgg

SEQ ID NO: 5548 - DNA, 19 bp, Homo Sapiens
ggcacgtgcgtggagtggc

SEQ ID NO: 5549 - DNA, 19 bp, Homo Sapiens
gcacgtgcgtggagtggct

SEQ ID NO: 5550 - DNA, 19 bp, Homo Sapiens
cacgtgcgtggagtggctc

SEQ ID NO: 5551 - DNA, 19 bp, Homo Sapiens
acgtgcgtggagtggctcc

SEQ ID NO: 5552 - DNA, 19 bp, Homo Sapiens
cgtgcgtggagtggctccg

SEQ ID NO: 5553 - DNA, 19 bp, Homo Sapiens
gtgcgtggagtggctccgc

SEQ ID NO: 5554 - DNA, 19 bp, Homo Sapiens
tgcgtggagtggctccgca

SEQ ID NO: 5555 - DNA, 19 bp, Homo Sapiens
gcgtggagtggctccgcag

SEQ ID NO: 5556 - DNA, 19 bp, Homo Sapiens
cgtggagtggctccgcaga

SEQ ID NO: 5557 - DNA, 19 bp, Homo Sapiens
gtggagtggctccgcagat

SEQ ID NO: 5558 - DNA, 19 bp, Homo Sapiens
ggagtggctccgcagatac

SEQ ID NO: 5559 - DNA, 19 bp, Homo Sapiens
gagtggctccgcagatacc

SEQ ID NO: 5560 - DNA, 19 bp, Homo Sapiens
tggctccgcagatacctgg

SEQ ID NO: 5561 - DNA, 19 bp, Homo Sapiens
ggctccgcagatacctgga

SEQ ID NO: 5562 - DNA, 19 bp, Homo Sapiens
gctccgcagatacctggag

SEQ ID NO: 5563 - DNA, 19 bp, Homo Sapiens
cctggagaacgggaaggag

SEQ ID NO: 5564 - DNA, 19 bp, Homo Sapiens
ggagaacgggaaggagacg

SEQ ID NO: 5565 - DNA, 19 bp, Homo Sapiens
gagaacgggaaggagacgc

SEQ ID NO: 5566 - DNA, 19 bp, Homo Sapiens
gaacgggaaggagacgctg

SEQ ID NO: 5567 - DNA, 19 bp, Homo Sapiens
aacgggaaggagacgctgc

SEQ ID NO: 5568 - DNA, 19 bp, Homo Sapiens
acgggaaggagacgctgca

SEQ ID NO: 5569 - DNA, 19 bp, Homo Sapiens
cgggaaggagacgctgcag

SEQ ID NO: 5570 - DNA, 19 bp, Homo Sapiens
gggaaggagacgctgcagc

SEQ ID NO: 5571 - DNA, 19 bp, Homo Sapiens
ggaaggagacgctgcagcg

SEQ ID NO: 5572 - DNA, 19 bp, Homo Sapiens
gaaggagacgctgcagcgc

SEQ ID NO: 5573 - DNA, 19 bp, Homo Sapiens
aaggagacgctgcagcgca

SEQ ID NO: 5574 - DNA, 19 bp, Homo Sapiens
aggagacgctgcagcgcac

SEQ ID NO: 5575 - DNA, 19 bp, Homo Sapiens
ggagacgctgcagcgcacg

SEQ ID NO: 5576 - DNA, 19 bp, Homo Sapiens
gagacgctgcagcgcacgg

SEQ ID NO: 5577 - DNA, 19 bp, Homo Sapiens
agacgctgcagcgcacgga

SEQ ID NO: 5578 - DNA, 19 bp, Homo Sapiens
gacgctgcagcgcacggac

SEQ ID NO: 5579 - DNA, 19 bp, Homo Sapiens
acgctgcagcgcacggacg

SEQ ID NO: 5580 - DNA, 19 bp, Homo Sapiens
cgctgcagcgcacggacgc

SEQ ID NO: 5581 - DNA, 19 bp, Homo Sapiens
gctgcagcgcacggacgcc

SEQ ID NO: 5582 - DNA, 19 bp, Homo Sapiens
ctgcagcgcacggacgccc

SEQ ID NO: 5583 - DNA, 19 bp, Homo Sapiens
tgcagcgcacggacgcccc

SEQ ID NO: 5584 - DNA, 19 bp, Homo Sapiens
gcagcgcacggacgccccc

SEQ ID NO: 5585 - DNA, 19 bp, Homo Sapiens
cagcgcacggacgccccca

SEQ ID NO: 5586 - DNA, 19 bp, Homo Sapiens
agcgcacggacgcccccaa

SEQ ID NO: 5587 - DNA, 19 bp, Homo Sapiens
gcgcacggacgcccccaaa

SEQ ID NO: 5588 - DNA, 19 bp, Homo Sapiens
cgcacggacgcccccaaaa

SEQ ID NO: 5589 - DNA, 19 bp, Homo Sapiens
gcacggacgcccccaaaac

SEQ ID NO: 5590 - DNA, 19 bp, Homo Sapiens
cacggacgcccccaaaacg

SEQ ID NO: 5591 - DNA, 19 bp, Homo Sapiens
acggacgcccccaaaacgc

SEQ ID NO: 5592 - DNA, 19 bp, Homo Sapiens
cggacgcccccaaaacgca

SEQ ID NO: 5593 - DNA, 19 bp, Homo Sapiens
ggacgcccccaaaacgcat

SEQ ID NO: 5594 - DNA, 19 bp, Homo Sapiens
caccacgctgtctctgacc

SEQ ID NO: 5595 - DNA, 19 bp, Homo Sapiens
ccatgaagccaccctgagg

SEQ ID NO: 5596 - DNA, 19 bp, Homo Sapiens
tgaagccaccctgaggtgc

SEQ ID NO: 5597 - DNA, 19 bp, Homo Sapiens
gaagccaccctgaggtgct

SEQ ID NO: 5598 - DNA, 19 bp, Homo Sapiens
aagccaccctgaggtgctg

SEQ ID NO: 5599 - DNA, 19 bp, Homo Sapiens
agccaccctgaggtgctgg

SEQ ID NO: 5600 - DNA, 19 bp, Homo Sapiens
gccaccctgaggtgctggg

SEQ ID NO: 5601 - DNA, 19 bp, Homo Sapiens
ccaccctgaggtgctgggc

SEQ ID NO: 5602 - DNA, 19 bp, Homo Sapiens
caccctgaggtgctgggcc

SEQ ID NO: 5603 - DNA, 19 bp, Homo Sapiens
accctgaggtgctgggccc

SEQ ID NO: 5604 - DNA, 19 bp, Homo Sapiens
ccctgaggtgctgggccct

SEQ ID NO: 5605 - DNA, 19 bp, Homo Sapiens
cctgaggtgctgggccctg

SEQ ID NO: 5606 - DNA, 19 bp, Homo Sapiens
ctgaggtgctgggccctga

SEQ ID NO: 5607 - DNA, 19 bp, Homo Sapiens
tgaggtgctgggccctgag

SEQ ID NO: 5608 - DNA, 19 bp, Homo Sapiens
gaggtgctgggccctgagc

SEQ ID NO: 5609 - DNA, 19 bp, Homo Sapiens
aggtgctgggccctgagct

SEQ ID NO: 5610 - DNA, 19 bp, Homo Sapiens
ggtgctgggccctgagctt

SEQ ID NO: 5611 - DNA, 19 bp, Homo Sapiens
gtgctgggccctgagcttc

SEQ ID NO: 5612 - DNA, 19 bp, Homo Sapiens
tgctgggccctgagcttct

SEQ ID NO: 5613 - DNA, 19 bp, Homo Sapiens
gctgggccctgagcttcta

SEQ ID NO: 5614 - DNA, 19 bp, Homo Sapiens
ctgggccctgagcttctac

SEQ ID NO: 5615 - DNA, 19 bp, Homo Sapiens
tgggccctgagcttctacc

SEQ ID NO: 5616 - DNA, 19 bp, Homo Sapiens
gggccctgagcttctaccc

SEQ ID NO: 5617 - DNA, 19 bp, Homo Sapiens
ggccctgagcttctaccct

SEQ ID NO: 5618 - DNA, 19 bp, Homo Sapiens
gccctgagcttctaccctg

SEQ ID NO: 5619 - DNA, 19 bp, Homo Sapiens
ccctgagcttctaccctgc

SEQ ID NO: 5620 - DNA, 19 bp, Homo Sapiens
cctgagcttctaccctgcg

SEQ ID NO: 5621 - DNA, 19 bp, Homo Sapiens
ctgagcttctaccctgcgg

SEQ ID NO: 5622 - DNA, 19 bp, Homo Sapiens
gagcttctaccctgcggag

SEQ ID NO: 5623 - DNA, 19 bp, Homo Sapiens
ccctgcggagatcacactg

SEQ ID NO: 5624 - DNA, 19 bp, Homo Sapiens
tcacactgacctggcagcg

SEQ ID NO: 5625 - DNA, 19 bp, Homo Sapiens
cacactgacctggcagcgg

SEQ ID NO: 5626 - DNA, 19 bp, Homo Sapiens
acactgacctggcagcggg

SEQ ID NO: 5627 - DNA, 19 bp, Homo Sapiens
cactgacctggcagcggga

SEQ ID NO: 5628 - DNA, 19 bp, Homo Sapiens
actgacctggcagcgggat

SEQ ID NO: 5629 - DNA, 19 bp, Homo Sapiens
ctgacctggcagcgggatg

SEQ ID NO: 5630 - DNA, 19 bp, Homo Sapiens
tgacctggcagcgggatgg

SEQ ID NO: 5631 - DNA, 19 bp, Homo Sapiens
gacctggcagcgggatggg

SEQ ID NO: 5632 - DNA, 19 bp, Homo Sapiens
acctggcagcgggatgggg

SEQ ID NO: 5633 - DNA, 19 bp, Homo Sapiens
cctggcagcgggatgggga

SEQ ID NO: 5634 - DNA, 19 bp, Homo Sapiens
ctggcagcgggatggggag

SEQ ID NO: 5635 - DNA, 19 bp, Homo Sapiens
tggcagcgggatggggagg

SEQ ID NO: 5636 - DNA, 19 bp, Homo Sapiens
ggcagcgggatggggagga

SEQ ID NO: 5637 - DNA, 19 bp, Homo Sapiens
gcagcgggatggggaggac

SEQ ID NO: 5638 - DNA, 19 bp, Homo Sapiens
cagcgggatggggaggacc

SEQ ID NO: 5639 - DNA, 19 bp, Homo Sapiens
agcgggatggggaggacca

SEQ ID NO: 5640 - DNA, 19 bp, Homo Sapiens
gcgggatggggaggaccag

SEQ ID NO: 5641 - DNA, 19 bp, Homo Sapiens
cgggatggggaggaccaga

SEQ ID NO: 5642 - DNA, 19 bp, Homo Sapiens
gggatggggaggaccagac

SEQ ID NO: 5643 - DNA, 19 bp, Homo Sapiens
ggatggggaggaccagacc

SEQ ID NO: 5644 - DNA, 19 bp, Homo Sapiens
gatggggaggaccagaccc

SEQ ID NO: 5645 - DNA, 19 bp, Homo Sapiens
atggggaggaccagaccca

SEQ ID NO: 5646 - DNA, 19 bp, Homo Sapiens
tggggaggaccagacccag

SEQ ID NO: 5647 - DNA, 19 bp, Homo Sapiens
ggggaggaccagacccagg

SEQ ID NO: 5648 - DNA, 19 bp, Homo Sapiens
gggaggaccagacccagga

SEQ ID NO: 5649 - DNA, 19 bp, Homo Sapiens
ggaggaccagacccaggac

SEQ ID NO: 5650 - DNA, 19 bp, Homo Sapiens
gaggaccagacccaggaca

SEQ ID NO: 5651 - DNA, 19 bp, Homo Sapiens
aggaccagacccaggacac

SEQ ID NO: 5652 - DNA, 19 bp, Homo Sapiens
ggaccagacccaggacacg

SEQ ID NO: 5653 - DNA, 19 bp, Homo Sapiens
gaccagacccaggacacgg

SEQ ID NO: 5654 - DNA, 19 bp, Homo Sapiens
accagacccaggacacgga

SEQ ID NO: 5655 - DNA, 19 bp, Homo Sapiens
ccagacccaggacacggag

SEQ ID NO: 5656 - DNA, 19 bp, Homo Sapiens
cagacccaggacacggagc

SEQ ID NO: 5657 - DNA, 19 bp, Homo Sapiens
agacccaggacacggagct

SEQ ID NO: 5658 - DNA, 19 bp, Homo Sapiens
gacccaggacacggagctc

SEQ ID NO: 5659 - DNA, 19 bp, Homo Sapiens
acccaggacacggagctcg

SEQ ID NO: 5660 - DNA, 19 bp, Homo Sapiens
cccaggacacggagctcgt

SEQ ID NO: 5661 - DNA, 19 bp, Homo Sapiens
ccaggacacggagctcgtg

SEQ ID NO: 5662 - DNA, 19 bp, Homo Sapiens
caggacacggagctcgtgg

SEQ ID NO: 5663 - DNA, 19 bp, Homo Sapiens
aggacacggagctcgtgga

SEQ ID NO: 5664 - DNA, 19 bp, Homo Sapiens
ggacacggagctcgtggag

SEQ ID NO: 5665 - DNA, 19 bp, Homo Sapiens
gacacggagctcgtggaga

SEQ ID NO: 5666 - DNA, 19 bp, Homo Sapiens
acacggagctcgtggagac

SEQ ID NO: 5667 - DNA, 19 bp, Homo Sapiens
cacggagctcgtggagacc

SEQ ID NO: 5668 - DNA, 19 bp, Homo Sapiens
acggagctcgtggagacca

SEQ ID NO: 5669 - DNA, 19 bp, Homo Sapiens
cggagctcgtggagaccag

SEQ ID NO: 5670 - DNA, 19 bp, Homo Sapiens
ggagctcgtggagaccagg

SEQ ID NO: 5671 - DNA, 19 bp, Homo Sapiens
gagctcgtggagaccaggc

SEQ ID NO: 5672 - DNA, 19 bp, Homo Sapiens
agctcgtggagaccaggcc

SEQ ID NO: 5673 - DNA, 19 bp, Homo Sapiens
gctcgtggagaccaggcct

SEQ ID NO: 5674 - DNA, 19 bp, Homo Sapiens
ctcgtggagaccaggcctg

SEQ ID NO: 5675 - DNA, 19 bp, Homo Sapiens
tcgtggagaccaggcctgc

SEQ ID NO: 5676 - DNA, 19 bp, Homo Sapiens
cgtggagaccaggcctgca

SEQ ID NO: 5677 - DNA, 19 bp, Homo Sapiens
gtggagaccaggcctgcag

SEQ ID NO: 5678 - DNA, 19 bp, Homo Sapiens
tggagaccaggcctgcagg

SEQ ID NO: 5679 - DNA, 19 bp, Homo Sapiens
ggagaccaggcctgcaggg

SEQ ID NO: 5680 - DNA, 19 bp, Homo Sapiens
gagaccaggcctgcagggg

SEQ ID NO: 5681 - DNA, 19 bp, Homo Sapiens
agaccaggcctgcagggga

SEQ ID NO: 5682 - DNA, 19 bp, Homo Sapiens
gaccaggcctgcaggggat

SEQ ID NO: 5683 - DNA, 19 bp, Homo Sapiens
accaggcctgcaggggatg

SEQ ID NO: 5684 - DNA, 19 bp, Homo Sapiens
ccaggcctgcaggggatgg

SEQ ID NO: 5685 - DNA, 19 bp, Homo Sapiens
caggcctgcaggggatgga

SEQ ID NO: 5686 - DNA, 19 bp, Homo Sapiens
aggcctgcaggggatggaa

SEQ ID NO: 5687 - DNA, 19 bp, Homo Sapiens
ggcctgcaggggatggaac

SEQ ID NO: 5688 - DNA, 19 bp, Homo Sapiens
gcctgcaggggatggaacc

SEQ ID NO: 5689 - DNA, 19 bp, Homo Sapiens
cctgcaggggatggaacct

SEQ ID NO: 5690 - DNA, 19 bp, Homo Sapiens
gcaggggatggaaccttcc

SEQ ID NO: 5691 - DNA, 19 bp, Homo Sapiens
accttccagaagtgggcgg

SEQ ID NO: 5692 - DNA, 19 bp, Homo Sapiens
ccttccagaagtgggcggc

SEQ ID NO: 5693 - DNA, 19 bp, Homo Sapiens
cttccagaagtgggcggct

SEQ ID NO: 5694 - DNA, 19 bp, Homo Sapiens
ttccagaagtgggcggctg

SEQ ID NO: 5695 - DNA, 19 bp, Homo Sapiens
tccagaagtgggcggctgt

SEQ ID NO: 5696 - DNA, 19 bp, Homo Sapiens
ccagaagtgggcggctgtg

SEQ ID NO: 5697 - DNA, 19 bp, Homo Sapiens
cagaagtgggcggctgtgg

SEQ ID NO: 5698 - DNA, 19 bp, Homo Sapiens
agaagtgggcggctgtggt

SEQ ID NO: 5699 - DNA, 19 bp, Homo Sapiens
gaagtgggcggctgtggtg

SEQ ID NO: 5700 - DNA, 19 bp, Homo Sapiens
aagtgggcggctgtggtgg

SEQ ID NO: 5701 - DNA, 19 bp, Homo Sapiens
agtgggcggctgtggtggt

SEQ ID NO: 5702 - DNA, 19 bp, Homo Sapiens
gtgggcggctgtggtggtg

SEQ ID NO: 5703 - DNA, 19 bp, Homo Sapiens
tgggcggctgtggtggtgc

SEQ ID NO: 5704 - DNA, 19 bp, Homo Sapiens
gggcggctgtggtggtgcc

SEQ ID NO: 5705 - DNA, 19 bp, Homo Sapiens
ggcggctgtggtggtgcct

SEQ ID NO: 5706 - DNA, 19 bp, Homo Sapiens
gcggctgtggtggtgcctt

SEQ ID NO: 5707 - DNA, 19 bp, Homo Sapiens
cggctgtggtggtgccttc

SEQ ID NO: 5708 - DNA, 19 bp, Homo Sapiens
ggctgtggtggtgccttct

SEQ ID NO: 5709 - DNA, 19 bp, Homo Sapiens
gctgtggtggtgccttctg

SEQ ID NO: 5710 - DNA, 19 bp, Homo Sapiens
ctgtggtggtgccttctgg

SEQ ID NO: 5711 - DNA, 19 bp, Homo Sapiens
gtggtggtgccttctggac

SEQ ID NO: 5712 - DNA, 19 bp, Homo Sapiens
ggtggtgccttctggacag

SEQ ID NO: 5713 - DNA, 19 bp, Homo Sapiens
gtggtgccttctggacagg

SEQ ID NO: 5714 - DNA, 19 bp, Homo Sapiens
ggtgccttctggacaggag

SEQ ID NO: 5715 - DNA, 19 bp, Homo Sapiens
gtgccttctggacaggagc

SEQ ID NO: 5716 - DNA, 19 bp, Homo Sapiens
gccttctggacaggagcag

SEQ ID NO: 5717 - DNA, 19 bp, Homo Sapiens
gccatgtgcagcatgaggg

SEQ ID NO: 5718 - DNA, 19 bp, Homo Sapiens
gcagcatgagggtttgccc

SEQ ID NO: 5719 - DNA, 19 bp, Homo Sapiens
tgagggtttgcccaagccc

SEQ ID NO: 5720 - DNA, 19 bp, Homo Sapiens
gagggtttgcccaagcccc

SEQ ID NO: 5721 - DNA, 19 bp, Homo Sapiens
agggtttgcccaagcccct

SEQ ID NO: 5722 - DNA, 19 bp, Homo Sapiens
gggtttgcccaagcccctc

SEQ ID NO: 5723 - DNA, 19 bp, Homo Sapiens
ggtttgcccaagcccctca

SEQ ID NO: 5724 - DNA, 19 bp, Homo Sapiens
gtttgcccaagcccctcac

SEQ ID NO: 5725 - DNA, 19 bp, Homo Sapiens
tttgcccaagcccctcacc

SEQ ID NO: 5726 - DNA, 19 bp, Homo Sapiens
ttgcccaagcccctcaccc

SEQ ID NO: 5727 - DNA, 19 bp, Homo Sapiens
tgcccaagcccctcaccct

SEQ ID NO: 5728 - DNA, 19 bp, Homo Sapiens
gcccaagcccctcaccctg

SEQ ID NO: 5729 - DNA, 19 bp, Homo Sapiens
cccaagcccctcaccctga

SEQ ID NO: 5730 - DNA, 19 bp, Homo Sapiens
ccaagcccctcaccctgag

SEQ ID NO: 5731 - DNA, 19 bp, Homo Sapiens
caagcccctcaccctgaga

SEQ ID NO: 5732 - DNA, 19 bp, Homo Sapiens
agcccctcaccctgagatg

SEQ ID NO: 5733 - DNA, 19 bp, Homo Sapiens
gcccctcaccctgagatgg

SEQ ID NO: 5734 - DNA, 19 bp, Homo Sapiens
cccctcaccctgagatggg

SEQ ID NO: 5735 - DNA, 19 bp, Homo Sapiens
ccctcaccctgagatggga

SEQ ID NO: 5736 - DNA, 19 bp, Homo Sapiens
cctcaccctgagatgggag

SEQ ID NO: 5737 - DNA, 19 bp, Homo Sapiens
ctcaccctgagatgggagc

SEQ ID NO: 5738 - DNA, 19 bp, Homo Sapiens
tcaccctgagatgggagcc

SEQ ID NO: 5739 - DNA, 19 bp, Homo Sapiens
caccctgagatgggagccg

SEQ ID NO: 5740 - DNA, 19 bp, Homo Sapiens
accctgagatgggagccgt

SEQ ID NO: 5741 - DNA, 19 bp, Homo Sapiens
ccctgagatgggagccgtc

SEQ ID NO: 5742 - DNA, 19 bp, Homo Sapiens
cctgagatgggagccgtct

SEQ ID NO: 5743 - DNA, 19 bp, Homo Sapiens
gagatgggagccgtcttcc

SEQ ID NO: 5744 - DNA, 19 bp, Homo Sapiens
agatgggagccgtcttccc

SEQ ID NO: 5745 - DNA, 19 bp, Homo Sapiens
gatgggagccgtcttccca

SEQ ID NO: 5746 - DNA, 19 bp, Homo Sapiens
atgggagccgtcttcccag

SEQ ID NO: 5747 - DNA, 19 bp, Homo Sapiens
tgggagccgtcttcccagc

SEQ ID NO: 5748 - DNA, 19 bp, Homo Sapiens
gggagccgtcttcccagcc

SEQ ID NO: 5749 - DNA, 19 bp, Homo Sapiens
ggagccgtcttcccagccc

SEQ ID NO: 5750 - DNA, 19 bp, Homo Sapiens
gagccgtcttcccagccca

SEQ ID NO: 5751 - DNA, 19 bp, Homo Sapiens
agccgtcttcccagcccac

SEQ ID NO: 5752 - DNA, 19 bp, Homo Sapiens
gccgtcttcccagcccacc

SEQ ID NO: 5753 - DNA, 19 bp, Homo Sapiens
ccgtcttcccagcccacca

SEQ ID NO: 5754 - DNA, 19 bp, Homo Sapiens
cgtcttcccagcccaccat

SEQ ID NO: 5755 - DNA, 19 bp, Homo Sapiens
gtcttcccagcccaccatc

SEQ ID NO: 5756 - DNA, 19 bp, Homo Sapiens
tcttcccagcccaccatcc

SEQ ID NO: 5757 - DNA, 19 bp, Homo Sapiens
cttcccagcccaccatccc

SEQ ID NO: 5758 - DNA, 19 bp, Homo Sapiens
ttcccagcccaccatcccc

SEQ ID NO: 5759 - DNA, 19 bp, Homo Sapiens
tcccagcccaccatcccca

SEQ ID NO: 5760 - DNA, 19 bp, Homo Sapiens
cccagcccaccatccccat

SEQ ID NO: 5761 - DNA, 19 bp, Homo Sapiens
ccagcccaccatccccatc

SEQ ID NO: 5762 - DNA, 19 bp, Homo Sapiens
cagcccaccatccccatcg

SEQ ID NO: 5763 - DNA, 19 bp, Homo Sapiens
agcccaccatccccatcgt

SEQ ID NO: 5764 - DNA, 19 bp, Homo Sapiens
gcccaccatccccatcgtg

SEQ ID NO: 5765 - DNA, 19 bp, Homo Sapiens
cccaccatccccatcgtgg

SEQ ID NO: 5766 - DNA, 19 bp, Homo Sapiens
ccaccatccccatcgtggg

SEQ ID NO: 5767 - DNA, 19 bp, Homo Sapiens
caccatccccatcgtgggc

SEQ ID NO: 5768 - DNA, 19 bp, Homo Sapiens
accatccccatcgtgggca

SEQ ID NO: 5769 - DNA, 19 bp, Homo Sapiens
ccatccccatcgtgggcat

SEQ ID NO: 5770 - DNA, 19 bp, Homo Sapiens
catccccatcgtgggcatc

SEQ ID NO: 5771 - DNA, 19 bp, Homo Sapiens
cgtgggcatcattgctggc

SEQ ID NO: 5772 - DNA, 19 bp, Homo Sapiens
gtgggcatcattgctggcc

SEQ ID NO: 5773 - DNA, 19 bp, Homo Sapiens
gggcatcattgctggcctg

SEQ ID NO: 5774 - DNA, 19 bp, Homo Sapiens
ggcatcattgctggcctgg

SEQ ID NO: 5775 - DNA, 19 bp, Homo Sapiens
tcactggagctgtggtcgc

SEQ ID NO: 5776 - DNA, 19 bp, Homo Sapiens
cactggagctgtggtcgct

SEQ ID NO: 5777 - DNA, 19 bp, Homo Sapiens
actggagctgtggtcgctg

SEQ ID NO: 5778 - DNA, 19 bp, Homo Sapiens
ctggagctgtggtcgctgc

SEQ ID NO: 5779 - DNA, 19 bp, Homo Sapiens
tggagctgtggtcgctgct

SEQ ID NO: 5780 - DNA, 19 bp, Homo Sapiens
ggagctgtggtcgctgctg

SEQ ID NO: 5781 - DNA, 19 bp, Homo Sapiens
gagctgtggtcgctgctgt

SEQ ID NO: 5782 - DNA, 19 bp, Homo Sapiens
agctgtggtcgctgctgtg

SEQ ID NO: 5783 - DNA, 19 bp, Homo Sapiens
gctgtggtcgctgctgtga

SEQ ID NO: 5784 - DNA, 19 bp, Homo Sapiens
ggtcgctgctgtgatgtgg

SEQ ID NO: 5785 - DNA, 19 bp, Homo Sapiens
cgctgctgtgatgtggagg

SEQ ID NO: 5786 - DNA, 19 bp, Homo Sapiens
ggagggagctactctcagg

SEQ ID NO: 5787 - DNA, 19 bp, Homo Sapiens
gagggagctactctcaggc

SEQ ID NO: 5788 - DNA, 19 bp, Homo Sapiens
gggagctactctcaggctg

SEQ ID NO: 5789 - DNA, 19 bp, Homo Sapiens
ggagctactctcaggctgc

SEQ ID NO: 5790 - DNA, 19 bp, Homo Sapiens
gcaagcagtgacagtgccc

SEQ ID NO: 5791 - DNA, 19 bp, Homo Sapiens
agcagtgacagtgcccagg

SEQ ID NO: 5792 - DNA, 19 bp, Homo Sapiens
gcagtgacagtgcccaggg

SEQ ID NO: 5793 - DNA, 19 bp, Homo Sapiens
cagtgacagtgcccagggc

SEQ ID NO: 5794 - DNA, 19 bp, Homo Sapiens
agtgacagtgcccagggct

SEQ ID NO: 5795 - DNA, 19 bp, Homo Sapiens
gtgacagtgcccagggctc

SEQ ID NO: 5796 - DNA, 19 bp, Homo Sapiens
tgacagtgcccagggctct

SEQ ID NO: 5797 - DNA, 19 bp, Homo Sapiens
gacagtgcccagggctctg

SEQ ID NO: 5798 - DNA, 19 bp, Homo Sapiens
acagtgcccagggctctga

SEQ ID NO: 5799 - DNA, 19 bp, Homo Sapiens
cagtgcccagggctctgat

SEQ ID NO: 5800 - DNA, 19 bp, Homo Sapiens
agtgcccagggctctgatg

SEQ ID NO: 5801 - DNA, 19 bp, Homo Sapiens
gtgcccagggctctgatgt

SEQ ID NO: 5802 - DNA, 19 bp, Homo Sapiens
tgcccagggctctgatgtg

SEQ ID NO: 5803 - DNA, 19 bp, Homo Sapiens
gcccagggctctgatgtgt

SEQ ID NO: 5804 - DNA, 19 bp, Homo Sapiens
cccagggctctgatgtgtc

SEQ ID NO: 5805 - DNA, 19 bp, Homo Sapiens
gacagctgccttgtgtggg

SEQ ID NO: 5806 - DNA, 19 bp, Homo Sapiens
cagctgccttgtgtgggac

SEQ ID NO: 5807 - DNA, 19 bp, Homo Sapiens
gctgccttgtgtgggactg

SEQ ID NO: 5808 - DNA, 19 bp, Homo Sapiens
tgtgaggaggtggggagac

SEQ ID NO: 5809 - DNA, 19 bp, Homo Sapiens
gtgaggaggtggggagacc

SEQ ID NO: 5810 - DNA, 19 bp, Homo Sapiens
tgaggaggtggggagacca

SEQ ID NO: 5811 - DNA, 19 bp, Homo Sapiens
gaggaggtggggagaccac

SEQ ID NO: 5812 - DNA, 19 bp, Homo Sapiens
aggaggtggggagaccacc

SEQ ID NO: 5813 - DNA, 19 bp, Homo Sapiens
ggaggtggggagaccaccc

SEQ ID NO: 5814 - DNA, 19 bp, Homo Sapiens
gaggtggggagaccacccc

SEQ ID NO: 5815 - DNA, 19 bp, Homo Sapiens
aggtggggagaccacccca

SEQ ID NO: 5816 - DNA, 19 bp, Homo Sapiens
ggtggggagaccaccccac

SEQ ID NO: 5817 - DNA, 19 bp, Homo Sapiens
gtggggagaccaccccacc

SEQ ID NO: 5818 - DNA, 19 bp, Homo Sapiens
tggggagaccaccccaccc

SEQ ID NO: 5819 - DNA, 19 bp, Homo Sapiens
ggggagaccaccccacccc

SEQ ID NO: 5820 - DNA, 19 bp, Homo Sapiens
gggagaccaccccaccccc

SEQ ID NO: 5821 - DNA, 19 bp, Homo Sapiens
ggagaccaccccaccccca

SEQ ID NO: 5822 - DNA, 19 bp, Homo Sapiens
gagaccaccccacccccat

SEQ ID NO: 5823 - DNA, 19 bp, Homo Sapiens
agaccaccccacccccatg

SEQ ID NO: 5824 - DNA, 19 bp, Homo Sapiens
gaccaccccacccccatgt

SEQ ID NO: 5825 - DNA, 19 bp, Homo Sapiens
accaccccacccccatgtc

SEQ ID NO: 5826 - DNA, 19 bp, Homo Sapiens
ccaccccacccccatgtcc

SEQ ID NO: 5827 - DNA, 19 bp, Homo Sapiens
caccccacccccatgtcca

SEQ ID NO: 5828 - DNA, 19 bp, Homo Sapiens
accccacccccatgtccac

SEQ ID NO: 5829 - DNA, 19 bp, Homo Sapiens
ccccacccccatgtccacc

SEQ ID NO: 5830 - DNA, 19 bp, Homo Sapiens
cccacccccatgtccacca

SEQ ID NO: 5831 - DNA, 19 bp, Homo Sapiens
ccacccccatgtccaccat

SEQ ID NO: 5832 - DNA, 19 bp, Homo Sapiens
cacccccatgtccaccatg

SEQ ID NO: 5833 - DNA, 19 bp, Homo Sapiens
cccccatgtccaccatgac

SEQ ID NO: 5834 - DNA, 19 bp, Homo Sapiens
ccccatgtccaccatgacc

SEQ ID NO: 5835 - DNA, 19 bp, Homo Sapiens
cccatgtccaccatgaccc

SEQ ID NO: 5836 - DNA, 19 bp, Homo Sapiens
ccaccatgaccctcttccc

SEQ ID NO: 5837 - DNA, 19 bp, Homo Sapiens
ccatgaccctcttcccacg

SEQ ID NO: 5838 - DNA, 19 bp, Homo Sapiens
catgaccctcttcccacgc

SEQ ID NO: 5839 - DNA, 19 bp, Homo Sapiens
tgaccctcttcccacgctg

SEQ ID NO: 5840 - DNA, 19 bp, Homo Sapiens
gaccctcttcccacgctga

SEQ ID NO: 5841 - DNA, 19 bp, Homo Sapiens
accctcttcccacgctgac

SEQ ID NO: 5842 - DNA, 19 bp, Homo Sapiens
ccctcttcccacgctgacc

SEQ ID NO: 5843 - DNA, 19 bp, Homo Sapiens
cctcttcccacgctgacct

SEQ ID NO: 5844 - DNA, 19 bp, Homo Sapiens
ctcttcccacgctgacctg

SEQ ID NO: 5845 - DNA, 19 bp, Homo Sapiens
cttcccacgctgacctgtg

SEQ ID NO: 5846 - DNA, 19 bp, Homo Sapiens
ttcccacgctgacctgtgc

SEQ ID NO: 5847 - DNA, 19 bp, Homo Sapiens
tcccacgctgacctgtgct

SEQ ID NO: 5848 - DNA, 19 bp, Homo Sapiens
cccacgctgacctgtgctc

SEQ ID NO: 5849 - DNA, 19 bp, Homo Sapiens
ccacgctgacctgtgctcc

SEQ ID NO: 5850 - DNA, 19 bp, Homo Sapiens
cacgctgacctgtgctccc

SEQ ID NO: 5851 - DNA, 19 bp, Homo Sapiens
acgctgacctgtgctccct

SEQ ID NO: 5852 - DNA, 19 bp, Homo Sapiens
cgctgacctgtgctccctc

SEQ ID NO: 5853 - DNA, 19 bp, Homo Sapiens
gctgacctgtgctccctcc

SEQ ID NO: 5854 - DNA, 19 bp, Homo Sapiens
ctgacctgtgctccctccc

SEQ ID NO: 5855 - DNA, 19 bp, Homo Sapiens
tgacctgtgctccctcccc

SEQ ID NO: 5856 - DNA, 19 bp, Homo Sapiens
gacctgtgctccctcccca

SEQ ID NO: 5857 - DNA, 19 bp, Homo Sapiens
acctgtgctccctccccaa

SEQ ID NO: 5858 - DNA, 19 bp, Homo Sapiens
cctgtgctccctccccaat

SEQ ID NO: 5859 - DNA, 19 bp, Homo Sapiens
ctgtgctccctccccaatc

SEQ ID NO: 5860 - DNA, 19 bp, Homo Sapiens
cctgttccagagaggtggg

SEQ ID NO: 5861 - DNA, 19 bp, Homo Sapiens
ctgttccagagaggtgggg

SEQ ID NO: 5862 - DNA, 19 bp, Homo Sapiens
tgttccagagaggtggggc

SEQ ID NO: 5863 - DNA, 19 bp, Homo Sapiens
gttccagagaggtggggct

SEQ ID NO: 5864 - DNA, 19 bp, Homo Sapiens
ttccagagaggtggggctg

SEQ ID NO: 5865 - DNA, 19 bp, Homo Sapiens
tccagagaggtggggctga

SEQ ID NO: 5866 - DNA, 19 bp, Homo Sapiens
ccagagaggtggggctgag

SEQ ID NO: 5867 - DNA, 19 bp, Homo Sapiens
cagagaggtggggctgagg

SEQ ID NO: 5868 - DNA, 19 bp, Homo Sapiens
agagaggtggggctgaggt

SEQ ID NO: 5869 - DNA, 19 bp, Homo Sapiens
gagaggtggggctgaggtg

SEQ ID NO: 5870 - DNA, 19 bp, Homo Sapiens
agaggtggggctgaggtgt

SEQ ID NO: 5871 - DNA, 19 bp, Homo Sapiens
gaggtggggctgaggtgtc

SEQ ID NO: 5872 - DNA, 19 bp, Homo Sapiens
aggtggggctgaggtgtct

SEQ ID NO: 5873 - DNA, 19 bp, Homo Sapiens
ggtggggctgaggtgtctc

SEQ ID NO: 5874 - DNA, 19 bp, Homo Sapiens
gtggggctgaggtgtctcc

SEQ ID NO: 5875 - DNA, 19 bp, Homo Sapiens
tggggctgaggtgtctcca

SEQ ID NO: 5876 - DNA, 19 bp, Homo Sapiens
ggggctgaggtgtctccat

SEQ ID NO: 5877 - DNA, 19 bp, Homo Sapiens
gggctgaggtgtctccatc

SEQ ID NO: 5878 - DNA, 20 bp, Homo Sapiens
cagaagcagaggggtcaggg

SEQ ID NO: 5879 - DNA, 20 bp, Homo Sapiens
agaagcagaggggtcagggc

SEQ ID NO: 5880 - DNA, 20 bp, Homo Sapiens
gaagcagaggggtcagggcg

SEQ ID NO: 5881 - DNA, 20 bp, Homo Sapiens
aagcagaggggtcagggcga

SEQ ID NO: 5882 - DNA, 20 bp, Homo Sapiens
agcagaggggtcagggcgaa

SEQ ID NO: 5883 - DNA, 20 bp, Homo Sapiens
gcagaggggtcagggcgaag

SEQ ID NO: 5884 - DNA, 20 bp, Homo Sapiens
cagaggggtcagggcgaagt

SEQ ID NO: 5885 - DNA, 20 bp, Homo Sapiens
agaggggtcagggcgaagtc

SEQ ID NO: 5886 - DNA, 20 bp, Homo Sapiens
gaggggtcagggcgaagtcc

SEQ ID NO: 5887 - DNA, 20 bp, Homo Sapiens
aggggtcagggcgaagtccc

SEQ ID NO: 5888 - DNA, 20 bp, Homo Sapiens
ggggtcagggcgaagtccca

SEQ ID NO: 5889 - DNA, 20 bp, Homo Sapiens
gggtcagggcgaagtcccag

SEQ ID NO: 5890 - DNA, 20 bp, Homo Sapiens
ggtcagggcgaagtcccagg

SEQ ID NO: 5891 - DNA, 20 bp, Homo Sapiens
gtcagggcgaagtcccaggg

SEQ ID NO: 5892 - DNA, 20 bp, Homo Sapiens
tcagggcgaagtcccagggc

SEQ ID NO: 5893 - DNA, 20 bp, Homo Sapiens
cagggcgaagtcccagggcc

SEQ ID NO: 5894 - DNA, 20 bp, Homo Sapiens
agggcgaagtcccagggccc

SEQ ID NO: 5895 - DNA, 20 bp, Homo Sapiens
gggcgaagtcccagggcccc

SEQ ID NO: 5896 - DNA, 20 bp, Homo Sapiens
ggcgaagtcccagggcccca

SEQ ID NO: 5897 - DNA, 20 bp, Homo Sapiens
gcgaagtcccagggccccag

SEQ ID NO: 5898 - DNA, 20 bp, Homo Sapiens
cgaagtcccagggccccagg

SEQ ID NO: 5899 - DNA, 20 bp, Homo Sapiens
gaagtcccagggccccaggc

SEQ ID NO: 5900 - DNA, 20 bp, Homo Sapiens
aagtcccagggccccaggcg

SEQ ID NO: 5901 - DNA, 20 bp, Homo Sapiens
agtcccagggccccaggcgt

SEQ ID NO: 5902 - DNA, 20 bp, Homo Sapiens
gtcccagggccccaggcgtg

SEQ ID NO: 5903 - DNA, 20 bp, Homo Sapiens
tcccagggccccaggcgtgg

SEQ ID NO: 5904 - DNA, 20 bp, Homo Sapiens
cccagggccccaggcgtggc

SEQ ID NO: 5905 - DNA, 20 bp, Homo Sapiens
ccagggccccaggcgtggct

SEQ ID NO: 5906 - DNA, 20 bp, Homo Sapiens
cagggccccaggcgtggctc

SEQ ID NO: 5907 - DNA, 20 bp, Homo Sapiens
agggccccaggcgtggctct

SEQ ID NO: 5908 - DNA, 20 bp, Homo Sapiens
gggccccaggcgtggctctc

SEQ ID NO: 5909 - DNA, 20 bp, Homo Sapiens
ggccccaggcgtggctctca

SEQ ID NO: 5910 - DNA, 20 bp, Homo Sapiens
gccccaggcgtggctctcag

SEQ ID NO: 5911 - DNA, 20 bp, Homo Sapiens
ccccaggcgtggctctcagg

SEQ ID NO: 5912 - DNA, 20 bp, Homo Sapiens
cccaggcgtggctctcaggg

SEQ ID NO: 5913 - DNA, 20 bp, Homo Sapiens
ccaggcgtggctctcagggt

SEQ ID NO: 5914 - DNA, 20 bp, Homo Sapiens
caggcgtggctctcagggtc

SEQ ID NO: 5915 - DNA, 20 bp, Homo Sapiens
aggcgtggctctcagggtct

SEQ ID NO: 5916 - DNA, 20 bp, Homo Sapiens
ggcgtggctctcagggtctc

SEQ ID NO: 5917 - DNA, 20 bp, Homo Sapiens
gcgtggctctcagggtctca

SEQ ID NO: 5918 - DNA, 20 bp, Homo Sapiens
cgtggctctcagggtctcag

SEQ ID NO: 5919 - DNA, 20 bp, Homo Sapiens
gtggctctcagggtctcagg

SEQ ID NO: 5920 - DNA, 20 bp, Homo Sapiens
tggctctcagggtctcaggc

SEQ ID NO: 5921 - DNA, 20 bp, Homo Sapiens
ggctctcagggtctcaggcc

SEQ ID NO: 5922 - DNA, 20 bp, Homo Sapiens
gctctcagggtctcaggccc

SEQ ID NO: 5923 - DNA, 20 bp, Homo Sapiens
ctctcagggtctcaggcccc

SEQ ID NO: 5924 - DNA, 20 bp, Homo Sapiens
tctcagggtctcaggccccg

SEQ ID NO: 5925 - DNA, 20 bp, Homo Sapiens
ctcagggtctcaggccccga

SEQ ID NO: 5926 - DNA, 20 bp, Homo Sapiens
tcagggtctcaggccccgaa

SEQ ID NO: 5927 - DNA, 20 bp, Homo Sapiens
cagggtctcaggccccgaag

SEQ ID NO: 5928 - DNA, 20 bp, Homo Sapiens
agggtctcaggccccgaagg

SEQ ID NO: 5929 - DNA, 20 bp, Homo Sapiens
gggtctcaggccccgaaggc

SEQ ID NO: 5930 - DNA, 20 bp, Homo Sapiens
ggtctcaggccccgaaggcg

SEQ ID NO: 5931 - DNA, 20 bp, Homo Sapiens
gtctcaggccccgaaggcgg

SEQ ID NO: 5932 - DNA, 20 bp, Homo Sapiens
tctcaggccccgaaggcggt

SEQ ID NO: 5933 - DNA, 20 bp, Homo Sapiens
ctcaggccccgaaggcggtg

SEQ ID NO: 5934 - DNA, 20 bp, Homo Sapiens
tcaggccccgaaggcggtgt

SEQ ID NO: 5935 - DNA, 20 bp, Homo Sapiens
caggccccgaaggcggtgta

SEQ ID NO: 5936 - DNA, 20 bp, Homo Sapiens
aggccccgaaggcggtgtat

SEQ ID NO: 5937 - DNA, 20 bp, Homo Sapiens
ggccccgaaggcggtgtatg

SEQ ID NO: 5938 - DNA, 20 bp, Homo Sapiens
gccccgaaggcggtgtatgg

SEQ ID NO: 5939 - DNA, 20 bp, Homo Sapiens
ccccgaaggcggtgtatgga

SEQ ID NO: 5940 - DNA, 20 bp, Homo Sapiens
cccgaaggcggtgtatggat

SEQ ID NO: 5941 - DNA, 20 bp, Homo Sapiens
aggcggtgtatggattgggg

SEQ ID NO: 5942 - DNA, 20 bp, Homo Sapiens
ggcggtgtatggattgggga

SEQ ID NO: 5943 - DNA, 20 bp, Homo Sapiens
gcggtgtatggattggggag

SEQ ID NO: 5944 - DNA, 20 bp, Homo Sapiens
atggattggggagtcccagc

SEQ ID NO: 5945 - DNA, 20 bp, Homo Sapiens
tggattggggagtcccagcc

SEQ ID NO: 5946 - DNA, 20 bp, Homo Sapiens
ggattggggagtcccagcct

SEQ ID NO: 5947 - DNA, 20 bp, Homo Sapiens
gattggggagtcccagcctt

SEQ ID NO: 5948 - DNA, 20 bp, Homo Sapiens
attggggagtcccagccttg

SEQ ID NO: 5949 - DNA, 20 bp, Homo Sapiens
ttggggagtcccagccttgg

SEQ ID NO: 5950 - DNA, 20 bp, Homo Sapiens
tggggagtcccagccttggg

SEQ ID NO: 5951 - DNA, 20 bp, Homo Sapiens
ggggagtcccagccttgggg

SEQ ID NO: 5952 - DNA, 20 bp, Homo Sapiens
gggagtcccagccttgggga

SEQ ID NO: 5953 - DNA, 20 bp, Homo Sapiens
ggagtcccagccttggggat

SEQ ID NO: 5954 - DNA, 20 bp, Homo Sapiens
gagtcccagccttggggatt

SEQ ID NO: 5955 - DNA, 20 bp, Homo Sapiens
agtcccagccttggggattc

SEQ ID NO: 5956 - DNA, 20 bp, Homo Sapiens
gtcccagccttggggattcc

SEQ ID NO: 5957 - DNA, 20 bp, Homo Sapiens
tcccagccttggggattccc

SEQ ID NO: 5958 - DNA, 20 bp, Homo Sapiens
cccagccttggggattcccc

SEQ ID NO: 5959 - DNA, 20 bp, Homo Sapiens
ccagccttggggattcccca

SEQ ID NO: 5960 - DNA, 20 bp, Homo Sapiens
cagccttggggattccccaa

SEQ ID NO: 5961 - DNA, 20 bp, Homo Sapiens
agccttggggattccccaac

SEQ ID NO: 5962 - DNA, 20 bp, Homo Sapiens
gccttggggattccccaact

SEQ ID NO: 5963 - DNA, 20 bp, Homo Sapiens
ccttggggattccccaactc

SEQ ID NO: 5964 - DNA, 20 bp, Homo Sapiens
cttggggattccccaactcc

SEQ ID NO: 5965 - DNA, 20 bp, Homo Sapiens
ttggggattccccaactccg

SEQ ID NO: 5966 - DNA, 20 bp, Homo Sapiens
tggggattccccaactccgc

SEQ ID NO: 5967 - DNA, 20 bp, Homo Sapiens
ggggattccccaactccgca

SEQ ID NO: 5968 - DNA, 20 bp, Homo Sapiens
gggattccccaactccgcag

SEQ ID NO: 5969 - DNA, 20 bp, Homo Sapiens
ggattccccaactccgcagt

SEQ ID NO: 5970 - DNA, 20 bp, Homo Sapiens
tcctggatactcacgacgcg

SEQ ID NO: 5971 - DNA, 20 bp, Homo Sapiens
cctggatactcacgacgcgg

SEQ ID NO: 5972 - DNA, 20 bp, Homo Sapiens
ctggatactcacgacgcgga

SEQ ID NO: 5973 - DNA, 20 bp, Homo Sapiens
tggatactcacgacgcggac

SEQ ID NO: 5974 - DNA, 20 bp, Homo Sapiens
ggatactcacgacgcggacc

SEQ ID NO: 5975 - DNA, 20 bp, Homo Sapiens
gatactcacgacgcggaccc

SEQ ID NO: 5976 - DNA, 20 bp, Homo Sapiens
atactcacgacgcggaccca

SEQ ID NO: 5977 - DNA, 20 bp, Homo Sapiens
tactcacgacgcggacccag

SEQ ID NO: 5978 - DNA, 20 bp, Homo Sapiens
actcacgacgcggacccagt

SEQ ID NO: 5979 - DNA, 20 bp, Homo Sapiens
ctcacgacgcggacccagtt

SEQ ID NO: 5980 - DNA, 20 bp, Homo Sapiens
tcacgacgcggacccagttc

SEQ ID NO: 5981 - DNA, 20 bp, Homo Sapiens
cacgacgcggacccagttct

SEQ ID NO: 5982 - DNA, 20 bp, Homo Sapiens
acgacgcggacccagttctc

SEQ ID NO: 5983 - DNA, 20 bp, Homo Sapiens
cgacgcggacccagttctca

SEQ ID NO: 5984 - DNA, 20 bp, Homo Sapiens
gacgcggacccagttctcac

SEQ ID NO: 5985 - DNA, 20 bp, Homo Sapiens
acgcggacccagttctcact

SEQ ID NO: 5986 - DNA, 20 bp, Homo Sapiens
cgcggacccagttctcactc

SEQ ID NO: 5987 - DNA, 20 bp, Homo Sapiens
gcggacccagttctcactcc

SEQ ID NO: 5988 - DNA, 20 bp, Homo Sapiens
cggacccagttctcactccc

SEQ ID NO: 5989 - DNA, 20 bp, Homo Sapiens
ggacccagttctcactccca

SEQ ID NO: 5990 - DNA, 20 bp, Homo Sapiens
ctcactcccattgggtgtcg

SEQ ID NO: 5991 - DNA, 20 bp, Homo Sapiens
tcactcccattgggtgtcgg

SEQ ID NO: 5992 - DNA, 20 bp, Homo Sapiens
cactcccattgggtgtcggg

SEQ ID NO: 5993 - DNA, 20 bp, Homo Sapiens
actcccattgggtgtcgggt

SEQ ID NO: 5994 - DNA, 20 bp, Homo Sapiens
ctcccattgggtgtcgggtt

SEQ ID NO: 5995 - DNA, 20 bp, Homo Sapiens
cccattgggtgtcgggtttc

SEQ ID NO: 5996 - DNA, 20 bp, Homo Sapiens
ccattgggtgtcgggtttcc

SEQ ID NO: 5997 - DNA, 20 bp, Homo Sapiens
tgggtgtcgggtttccagag

SEQ ID NO: 5998 - DNA, 20 bp, Homo Sapiens
gggtgtcgggtttccagaga

SEQ ID NO: 5999 - DNA, 20 bp, Homo Sapiens
gtcgggtttccagagaagcc

SEQ ID NO: 6000 - DNA, 20 bp, Homo Sapiens
agccaatcagtgtcgtcgcg

SEQ ID NO: 6001 - DNA, 20 bp, Homo Sapiens
gccaatcagtgtcgtcgcgg

SEQ ID NO: 6002 - DNA, 20 bp, Homo Sapiens
ccaatcagtgtcgtcgcggt

SEQ ID NO: 6003 - DNA, 20 bp, Homo Sapiens
caatcagtgtcgtcgcggtc

SEQ ID NO: 6004 - DNA, 20 bp, Homo Sapiens
aatcagtgtcgtcgcggtcg

SEQ ID NO: 6005 - DNA, 20 bp, Homo Sapiens
atcagtgtcgtcgcggtcgc

SEQ ID NO: 6006 - DNA, 20 bp, Homo Sapiens
tcagtgtcgtcgcggtcgcg

SEQ ID NO: 6007 - DNA, 20 bp, Homo Sapiens
cagtgtcgtcgcggtcgcgg

SEQ ID NO: 6008 - DNA, 20 bp, Homo Sapiens
agtgtcgtcgcggtcgcggt

SEQ ID NO: 6009 - DNA, 20 bp, Homo Sapiens
gtgtcgtcgcggtcgcggtt

SEQ ID NO: 6010 - DNA, 20 bp, Homo Sapiens
tgtcgtcgcggtcgcggttc

SEQ ID NO: 6011 - DNA, 20 bp, Homo Sapiens
gtcgtcgcggtcgcggttct

SEQ ID NO: 6012 - DNA, 20 bp, Homo Sapiens
tcgtcgcggtcgcggttcta

SEQ ID NO: 6013 - DNA, 20 bp, Homo Sapiens
cgtcgcggtcgcggttctaa

SEQ ID NO: 6014 - DNA, 20 bp, Homo Sapiens
gtcgcggtcgcggttctaaa

SEQ ID NO: 6015 - DNA, 20 bp, Homo Sapiens
tcgcggtcgcggttctaaag

SEQ ID NO: 6016 - DNA, 20 bp, Homo Sapiens
cgcggtcgcggttctaaagt

SEQ ID NO: 6017 - DNA, 20 bp, Homo Sapiens
gcggtcgcggttctaaagtc

SEQ ID NO: 6018 - DNA, 20 bp, Homo Sapiens
cggtcgcggttctaaagtcc

SEQ ID NO: 6019 - DNA, 20 bp, Homo Sapiens
ggtcgcggttctaaagtccg

SEQ ID NO: 6020 - DNA, 20 bp, Homo Sapiens
gtcgcggttctaaagtccgc

SEQ ID NO: 6021 - DNA, 20 bp, Homo Sapiens
cgcggttctaaagtccgcac

SEQ ID NO: 6022 - DNA, 20 bp, Homo Sapiens
gcggttctaaagtccgcacg

SEQ ID NO: 6023 - DNA, 20 bp, Homo Sapiens
cggttctaaagtccgcacgc

SEQ ID NO: 6024 - DNA, 20 bp, Homo Sapiens
tctaaagtccgcacgcaccc

SEQ ID NO: 6025 - DNA, 20 bp, Homo Sapiens
ctaaagtccgcacgcaccca

SEQ ID NO: 6026 - DNA, 20 bp, Homo Sapiens
taaagtccgcacgcacccac

SEQ ID NO: 6027 - DNA, 20 bp, Homo Sapiens
aaagtccgcacgcacccacc

SEQ ID NO: 6028 - DNA, 20 bp, Homo Sapiens
aagtccgcacgcacccaccg

SEQ ID NO: 6029 - DNA, 20 bp, Homo Sapiens
agtccgcacgcacccaccgg

SEQ ID NO: 6030 - DNA, 20 bp, Homo Sapiens
gtccgcacgcacccaccggg

SEQ ID NO: 6031 - DNA, 20 bp, Homo Sapiens
tccgcacgcacccaccggga

SEQ ID NO: 6032 - DNA, 20 bp, Homo Sapiens
ccgcacgcacccaccgggac

SEQ ID NO: 6033 - DNA, 20 bp, Homo Sapiens
cgcacgcacccaccgggact

SEQ ID NO: 6034 - DNA, 20 bp, Homo Sapiens
gcacgcacccaccgggactc

SEQ ID NO: 6035 - DNA, 20 bp, Homo Sapiens
cacgcacccaccgggactca

SEQ ID NO: 6036 - DNA, 20 bp, Homo Sapiens
acgcacccaccgggactcag

SEQ ID NO: 6037 - DNA, 20 bp, Homo Sapiens
cgcacccaccgggactcaga

SEQ ID NO: 6038 - DNA, 20 bp, Homo Sapiens
gcacccaccgggactcagat

SEQ ID NO: 6039 - DNA, 20 bp, Homo Sapiens
cacccaccgggactcagatt

SEQ ID NO: 6040 - DNA, 20 bp, Homo Sapiens
acccaccgggactcagattc

SEQ ID NO: 6041 - DNA, 20 bp, Homo Sapiens
cccaccgggactcagattct

SEQ ID NO: 6042 - DNA, 20 bp, Homo Sapiens
ccaccgggactcagattctc

SEQ ID NO: 6043 - DNA, 20 bp, Homo Sapiens
caccgggactcagattctcc

SEQ ID NO: 6044 - DNA, 20 bp, Homo Sapiens
accgggactcagattctccc

SEQ ID NO: 6045 - DNA, 20 bp, Homo Sapiens
ccgggactcagattctcccc

SEQ ID NO: 6046 - DNA, 20 bp, Homo Sapiens
cgggactcagattctcccca

SEQ ID NO: 6047 - DNA, 20 bp, Homo Sapiens
gggactcagattctccccag

SEQ ID NO: 6048 - DNA, 20 bp, Homo Sapiens
ctcagattctccccagacgc

SEQ ID NO: 6049 - DNA, 20 bp, Homo Sapiens
tcagattctccccagacgcc

SEQ ID NO: 6050 - DNA, 20 bp, Homo Sapiens
cagattctccccagacgccg

SEQ ID NO: 6051 - DNA, 20 bp, Homo Sapiens
agattctccccagacgccga

SEQ ID NO: 6052 - DNA, 20 bp, Homo Sapiens
gattctccccagacgccgag

SEQ ID NO: 6053 - DNA, 20 bp, Homo Sapiens
attctccccagacgccgagg

SEQ ID NO: 6054 - DNA, 20 bp, Homo Sapiens
ttctccccagacgccgagga

SEQ ID NO: 6055 - DNA, 20 bp, Homo Sapiens
tctccccagacgccgaggat

SEQ ID NO: 6056 - DNA, 20 bp, Homo Sapiens
ctccccagacgccgaggatg

SEQ ID NO: 6057 - DNA, 20 bp, Homo Sapiens
tccccagacgccgaggatgg

SEQ ID NO: 6058 - DNA, 20 bp, Homo Sapiens
ccccagacgccgaggatggc

SEQ ID NO: 6059 - DNA, 20 bp, Homo Sapiens
cccagacgccgaggatggcc

SEQ ID NO: 6060 - DNA, 20 bp, Homo Sapiens
ccagacgccgaggatggccg

SEQ ID NO: 6061 - DNA, 20 bp, Homo Sapiens
cagacgccgaggatggccgt

SEQ ID NO: 6062 - DNA, 20 bp, Homo Sapiens
agacgccgaggatggccgtc

SEQ ID NO: 6063 - DNA, 20 bp, Homo Sapiens
gacgccgaggatggccgtca

SEQ ID NO: 6064 - DNA, 20 bp, Homo Sapiens
acgccgaggatggccgtcat

SEQ ID NO: 6065 - DNA, 20 bp, Homo Sapiens
cgccgaggatggccgtcatg

SEQ ID NO: 6066 - DNA, 20 bp, Homo Sapiens
gccgaggatggccgtcatgg

SEQ ID NO: 6067 - DNA, 20 bp, Homo Sapiens
ccgaggatggccgtcatggc

SEQ ID NO: 6068 - DNA, 20 bp, Homo Sapiens
cgaggatggccgtcatggcg

SEQ ID NO: 6069 - DNA, 20 bp, Homo Sapiens
gaggatggccgtcatggcgc

SEQ ID NO: 6070 - DNA, 20 bp, Homo Sapiens
aggatggccgtcatggcgcc

SEQ ID NO: 6071 - DNA, 20 bp, Homo Sapiens
ggatggccgtcatggcgccc

SEQ ID NO: 6072 - DNA, 20 bp, Homo Sapiens
gatggccgtcatggcgcccc

SEQ ID NO: 6073 - DNA, 20 bp, Homo Sapiens
atggccgtcatggcgccccg

SEQ ID NO: 6074 - DNA, 20 bp, Homo Sapiens
tggccgtcatggcgccccga

SEQ ID NO: 6075 - DNA, 20 bp, Homo Sapiens
ggccgtcatggcgccccgaa

SEQ ID NO: 6076 - DNA, 20 bp, Homo Sapiens
gccgtcatggcgccccgaac

SEQ ID NO: 6077 - DNA, 20 bp, Homo Sapiens
ccgtcatggcgccccgaacc

SEQ ID NO: 6078 - DNA, 20 bp, Homo Sapiens
cgtcatggcgccccgaaccc

SEQ ID NO: 6079 - DNA, 20 bp, Homo Sapiens
gtcatggcgccccgaaccct

SEQ ID NO: 6080 - DNA, 20 bp, Homo Sapiens
tcatggcgccccgaaccctc

SEQ ID NO: 6081 - DNA, 20 bp, Homo Sapiens
catggcgccccgaaccctcg

SEQ ID NO: 6082 - DNA, 20 bp, Homo Sapiens
atggcgccccgaaccctcgt

SEQ ID NO: 6083 - DNA, 20 bp, Homo Sapiens
tggcgccccgaaccctcgtc

SEQ ID NO: 6084 - DNA, 20 bp, Homo Sapiens
ggcgccccgaaccctcgtcc

SEQ ID NO: 6085 - DNA, 20 bp, Homo Sapiens
gcgccccgaaccctcgtcct

SEQ ID NO: 6086 - DNA, 20 bp, Homo Sapiens
cgccccgaaccctcgtcctg

SEQ ID NO: 6087 - DNA, 20 bp, Homo Sapiens
gccccgaaccctcgtcctgc

SEQ ID NO: 6088 - DNA, 20 bp, Homo Sapiens
ccccgaaccctcgtcctgct

SEQ ID NO: 6089 - DNA, 20 bp, Homo Sapiens
cccgaaccctcgtcctgcta

SEQ ID NO: 6090 - DNA, 20 bp, Homo Sapiens
ccgaaccctcgtcctgctac

SEQ ID NO: 6091 - DNA, 20 bp, Homo Sapiens
cgaaccctcgtcctgctact

SEQ ID NO: 6092 - DNA, 20 bp, Homo Sapiens
gaaccctcgtcctgctactc

SEQ ID NO: 6093 - DNA, 20 bp, Homo Sapiens
accctcgtcctgctactctc

SEQ ID NO: 6094 - DNA, 20 bp, Homo Sapiens
ccctcgtcctgctactctcg

SEQ ID NO: 6095 - DNA, 20 bp, Homo Sapiens
cctcgtcctgctactctcgg

SEQ ID NO: 6096 - DNA, 20 bp, Homo Sapiens
ctcgtcctgctactctcggg

SEQ ID NO: 6097 - DNA, 20 bp, Homo Sapiens
tcgtcctgctactctcgggg

SEQ ID NO: 6098 - DNA, 20 bp, Homo Sapiens
cgtcctgctactctcggggg

SEQ ID NO: 6099 - DNA, 20 bp, Homo Sapiens
gtcctgctactctcgggggc

SEQ ID NO: 6100 - DNA, 20 bp, Homo Sapiens
tcctgctactctcgggggct

SEQ ID NO: 6101 - DNA, 20 bp, Homo Sapiens
cctgctactctcgggggctc

SEQ ID NO: 6102 - DNA, 20 bp, Homo Sapiens
ctgctactctcgggggctct

SEQ ID NO: 6103 - DNA, 20 bp, Homo Sapiens
tgctactctcgggggctctg

SEQ ID NO: 6104 - DNA, 20 bp, Homo Sapiens
gctactctcgggggctctgg

SEQ ID NO: 6105 - DNA, 20 bp, Homo Sapiens
ctactctcgggggctctggc

SEQ ID NO: 6106 - DNA, 20 bp, Homo Sapiens
tactctcgggggctctggcc

SEQ ID NO: 6107 - DNA, 20 bp, Homo Sapiens
actctcgggggctctggccc

SEQ ID NO: 6108 - DNA, 20 bp, Homo Sapiens
ctctcgggggctctggccct

SEQ ID NO: 6109 - DNA, 20 bp, Homo Sapiens
tctcgggggctctggccctg

SEQ ID NO: 6110 - DNA, 20 bp, Homo Sapiens
ctcgggggctctggccctga

SEQ ID NO: 6111 - DNA, 20 bp, Homo Sapiens
tcgggggctctggccctgac

SEQ ID NO: 6112 - DNA, 20 bp, Homo Sapiens
cgggggctctggccctgacc

SEQ ID NO: 6113 - DNA, 20 bp, Homo Sapiens
gggggctctggccctgaccc

SEQ ID NO: 6114 - DNA, 20 bp, Homo Sapiens
ggggctctggccctgaccca

SEQ ID NO: 6115 - DNA, 20 bp, Homo Sapiens
gggctctggccctgacccag

SEQ ID NO: 6116 - DNA, 20 bp, Homo Sapiens
ggctctggccctgacccaga

SEQ ID NO: 6117 - DNA, 20 bp, Homo Sapiens
gctctggccctgacccagac

SEQ ID NO: 6118 - DNA, 20 bp, Homo Sapiens
ctctggccctgacccagacc

SEQ ID NO: 6119 - DNA, 20 bp, Homo Sapiens
tctggccctgacccagacct

SEQ ID NO: 6120 - DNA, 20 bp, Homo Sapiens
ctggccctgacccagacctg

SEQ ID NO: 6121 - DNA, 20 bp, Homo Sapiens
tggccctgacccagacctgg

SEQ ID NO: 6122 - DNA, 20 bp, Homo Sapiens
ggccctgacccagacctggg

SEQ ID NO: 6123 - DNA, 20 bp, Homo Sapiens
gccctgacccagacctgggc

SEQ ID NO: 6124 - DNA, 20 bp, Homo Sapiens
ccctgacccagacctgggcg

SEQ ID NO: 6125 - DNA, 20 bp, Homo Sapiens
cctgacccagacctgggcgg

SEQ ID NO: 6126 - DNA, 20 bp, Homo Sapiens
ctgacccagacctgggcggg

SEQ ID NO: 6127 - DNA, 20 bp, Homo Sapiens
tgacccagacctgggcgggc

SEQ ID NO: 6128 - DNA, 20 bp, Homo Sapiens
gacccagacctgggcgggct

SEQ ID NO: 6129 - DNA, 20 bp, Homo Sapiens
acccagacctgggcgggctc

SEQ ID NO: 6130 - DNA, 20 bp, Homo Sapiens
cccagacctgggcgggctct

SEQ ID NO: 6131 - DNA, 20 bp, Homo Sapiens
ccagacctgggcgggctctc

SEQ ID NO: 6132 - DNA, 20 bp, Homo Sapiens
cagacctgggcgggctctca

SEQ ID NO: 6133 - DNA, 20 bp, Homo Sapiens
agacctgggcgggctctcac

SEQ ID NO: 6134 - DNA, 20 bp, Homo Sapiens
gacctgggcgggctctcact

SEQ ID NO: 6135 - DNA, 20 bp, Homo Sapiens
acctgggcgggctctcactc

SEQ ID NO: 6136 - DNA, 20 bp, Homo Sapiens
cctgggcgggctctcactcc

SEQ ID NO: 6137 - DNA, 20 bp, Homo Sapiens
ctgggcgggctctcactcca

SEQ ID NO: 6138 - DNA, 20 bp, Homo Sapiens
tgggcgggctctcactccat

SEQ ID NO: 6139 - DNA, 20 bp, Homo Sapiens
gggcgggctctcactccatg

SEQ ID NO: 6140 - DNA, 20 bp, Homo Sapiens
ggcgggctctcactccatga

SEQ ID NO: 6141 - DNA, 20 bp, Homo Sapiens
gcgggctctcactccatgag

SEQ ID NO: 6142 - DNA, 20 bp, Homo Sapiens
cgggctctcactccatgagg

SEQ ID NO: 6143 - DNA, 20 bp, Homo Sapiens
gggctctcactccatgaggt

SEQ ID NO: 6144 - DNA, 20 bp, Homo Sapiens
tcttcacatccgtgtcccgg

SEQ ID NO: 6145 - DNA, 20 bp, Homo Sapiens
cttcacatccgtgtcccggc

SEQ ID NO: 6146 - DNA, 20 bp, Homo Sapiens
ttcacatccgtgtcccggcc

SEQ ID NO: 6147 - DNA, 20 bp, Homo Sapiens
tcacatccgtgtcccggccc

SEQ ID NO: 6148 - DNA, 20 bp, Homo Sapiens
cacatccgtgtcccggcccg

SEQ ID NO: 6149 - DNA, 20 bp, Homo Sapiens
acatccgtgtcccggcccgg

SEQ ID NO: 6150 - DNA, 20 bp, Homo Sapiens
catccgtgtcccggcccggc

SEQ ID NO: 6151 - DNA, 20 bp, Homo Sapiens
atccgtgtcccggcccggcc

SEQ ID NO: 6152 - DNA, 20 bp, Homo Sapiens
tccgtgtcccggcccggccg

SEQ ID NO: 6153 - DNA, 20 bp, Homo Sapiens
ccgtgtcccggcccggccgc

SEQ ID NO: 6154 - DNA, 20 bp, Homo Sapiens
cgtgtcccggcccggccgcg

SEQ ID NO: 6155 - DNA, 20 bp, Homo Sapiens
gtgtcccggcccggccgcgg

SEQ ID NO: 6156 - DNA, 20 bp, Homo Sapiens
tgtcccggcccggccgcggg

SEQ ID NO: 6157 - DNA, 20 bp, Homo Sapiens
gtcccggcccggccgcgggg

SEQ ID NO: 6158 - DNA, 20 bp, Homo Sapiens
tcccggcccggccgcgggga

SEQ ID NO: 6159 - DNA, 20 bp, Homo Sapiens
cccggcccggccgcggggag

SEQ ID NO: 6160 - DNA, 20 bp, Homo Sapiens
ccggcccggccgcggggagc

SEQ ID NO: 6161 - DNA, 20 bp, Homo Sapiens
cggcccggccgcggggagcc

SEQ ID NO: 6162 - DNA, 20 bp, Homo Sapiens
ggcccggccgcggggagccc

SEQ ID NO: 6163 - DNA, 20 bp, Homo Sapiens
gcccggccgcggggagcccc

SEQ ID NO: 6164 - DNA, 20 bp, Homo Sapiens
cccggccgcggggagccccg

SEQ ID NO: 6165 - DNA, 20 bp, Homo Sapiens
ccggccgcggggagccccgc

SEQ ID NO: 6166 - DNA, 20 bp, Homo Sapiens
cggccgcggggagccccgct

SEQ ID NO: 6167 - DNA, 20 bp, Homo Sapiens
ggccgcggggagccccgctt

SEQ ID NO: 6168 - DNA, 20 bp, Homo Sapiens
gccgcggggagccccgcttc

SEQ ID NO: 6169 - DNA, 20 bp, Homo Sapiens
ccgcggggagccccgcttca

SEQ ID NO: 6170 - DNA, 20 bp, Homo Sapiens
cgcggggagccccgcttcat

SEQ ID NO: 6171 - DNA, 20 bp, Homo Sapiens
gcggggagccccgcttcatc

SEQ ID NO: 6172 - DNA, 20 bp, Homo Sapiens
cggggagccccgcttcatcg

SEQ ID NO: 6173 - DNA, 20 bp, Homo Sapiens
ggggagccccgcttcatcgc

SEQ ID NO: 6174 - DNA, 20 bp, Homo Sapiens
gggagccccgcttcatcgca

SEQ ID NO: 6175 - DNA, 20 bp, Homo Sapiens
ggagccccgcttcatcgcag

SEQ ID NO: 6176 - DNA, 20 bp, Homo Sapiens
gagccccgcttcatcgcagt

SEQ ID NO: 6177 - DNA, 20 bp, Homo Sapiens
agccccgcttcatcgcagtg

SEQ ID NO: 6178 - DNA, 20 bp, Homo Sapiens
gccccgcttcatcgcagtgg

SEQ ID NO: 6179 - DNA, 20 bp, Homo Sapiens
ccccgcttcatcgcagtggg

SEQ ID NO: 6180 - DNA, 20 bp, Homo Sapiens
cccgcttcatcgcagtgggc

SEQ ID NO: 6181 - DNA, 20 bp, Homo Sapiens
ccgcttcatcgcagtgggct

SEQ ID NO: 6182 - DNA, 20 bp, Homo Sapiens
cgcttcatcgcagtgggcta

SEQ ID NO: 6183 - DNA, 20 bp, Homo Sapiens
gcttcatcgcagtgggctac

SEQ ID NO: 6184 - DNA, 20 bp, Homo Sapiens
cttcatcgcagtgggctacg

SEQ ID NO: 6185 - DNA, 20 bp, Homo Sapiens
tcatcgcagtgggctacgtg

SEQ ID NO: 6186 - DNA, 20 bp, Homo Sapiens
catcgcagtgggctacgtgg

SEQ ID NO: 6187 - DNA, 20 bp, Homo Sapiens
atcgcagtgggctacgtgga

SEQ ID NO: 6188 - DNA, 20 bp, Homo Sapiens
tcgcagtgggctacgtggac

SEQ ID NO: 6189 - DNA, 20 bp, Homo Sapiens
cgcagtgggctacgtggacg

SEQ ID NO: 6190 - DNA, 20 bp, Homo Sapiens
gcagtgggctacgtggacga

SEQ ID NO: 6191 - DNA, 20 bp, Homo Sapiens
cagtgggctacgtggacgac

SEQ ID NO: 6192 - DNA, 20 bp, Homo Sapiens
agtgggctacgtggacgaca

SEQ ID NO: 6193 - DNA, 20 bp, Homo Sapiens
gtgggctacgtggacgacac

SEQ ID NO: 6194 - DNA, 20 bp, Homo Sapiens
tgggctacgtggacgacacg

SEQ ID NO: 6195 - DNA, 20 bp, Homo Sapiens
gggctacgtggacgacacgc

SEQ ID NO: 6196 - DNA, 20 bp, Homo Sapiens
ggctacgtggacgacacgca

SEQ ID NO: 6197 - DNA, 20 bp, Homo Sapiens
gctacgtggacgacacgcag

SEQ ID NO: 6198 - DNA, 20 bp, Homo Sapiens
ctacgtggacgacacgcagt

SEQ ID NO: 6199 - DNA, 20 bp, Homo Sapiens
acgtggacgacacgcagttc

SEQ ID NO: 6200 - DNA, 20 bp, Homo Sapiens
cgtggacgacacgcagttcg

SEQ ID NO: 6201 - DNA, 20 bp, Homo Sapiens
gtggacgacacgcagttcgt

SEQ ID NO: 6202 - DNA, 20 bp, Homo Sapiens
tggacgacacgcagttcgtg

SEQ ID NO: 6203 - DNA, 20 bp, Homo Sapiens
ggacgacacgcagttcgtgc

SEQ ID NO: 6204 - DNA, 20 bp, Homo Sapiens
gacgacacgcagttcgtgcg

SEQ ID NO: 6205 - DNA, 20 bp, Homo Sapiens
acgacacgcagttcgtgcgg

SEQ ID NO: 6206 - DNA, 20 bp, Homo Sapiens
cgacacgcagttcgtgcggt

SEQ ID NO: 6207 - DNA, 20 bp, Homo Sapiens
gacacgcagttcgtgcggtt

SEQ ID NO: 6208 - DNA, 20 bp, Homo Sapiens
acacgcagttcgtgcggttc

SEQ ID NO: 6209 - DNA, 20 bp, Homo Sapiens
cacgcagttcgtgcggttcg

SEQ ID NO: 6210 - DNA, 20 bp, Homo Sapiens
acgcagttcgtgcggttcga

SEQ ID NO: 6211 - DNA, 20 bp, Homo Sapiens
cgcagttcgtgcggttcgac

SEQ ID NO: 6212 - DNA, 20 bp, Homo Sapiens
gcagttcgtgcggttcgaca

SEQ ID NO: 6213 - DNA, 20 bp, Homo Sapiens
cagttcgtgcggttcgacag

SEQ ID NO: 6214 - DNA, 20 bp, Homo Sapiens
agttcgtgcggttcgacagc

SEQ ID NO: 6215 - DNA, 20 bp, Homo Sapiens
gttcgtgcggttcgacagcg

SEQ ID NO: 6216 - DNA, 20 bp, Homo Sapiens
ttcgtgcggttcgacagcga

SEQ ID NO: 6217 - DNA, 20 bp, Homo Sapiens
tcgtgcggttcgacagcgac

SEQ ID NO: 6218 - DNA, 20 bp, Homo Sapiens
cgtgcggttcgacagcgacg

SEQ ID NO: 6219 - DNA, 20 bp, Homo Sapiens
gtgcggttcgacagcgacgc

SEQ ID NO: 6220 - DNA, 20 bp, Homo Sapiens
tgcggttcgacagcgacgcc

SEQ ID NO: 6221 - DNA, 20 bp, Homo Sapiens
gcggttcgacagcgacgccg

SEQ ID NO: 6222 - DNA, 20 bp, Homo Sapiens
cggttcgacagcgacgccgc

SEQ ID NO: 6223 - DNA, 20 bp, Homo Sapiens
ggttcgacagcgacgccgcg

SEQ ID NO: 6224 - DNA, 20 bp, Homo Sapiens
gttcgacagcgacgccgcga

SEQ ID NO: 6225 - DNA, 20 bp, Homo Sapiens
ttcgacagcgacgccgcgag

SEQ ID NO: 6226 - DNA, 20 bp, Homo Sapiens
tcgacagcgacgccgcgagc

SEQ ID NO: 6227 - DNA, 20 bp, Homo Sapiens
cgacagcgacgccgcgagcc

SEQ ID NO: 6228 - DNA, 20 bp, Homo Sapiens
gacagcgacgccgcgagcca

SEQ ID NO: 6229 - DNA, 20 bp, Homo Sapiens
acagcgacgccgcgagccag

SEQ ID NO: 6230 - DNA, 20 bp, Homo Sapiens
cagcgacgccgcgagccaga

SEQ ID NO: 6231 - DNA, 20 bp, Homo Sapiens
agcgacgccgcgagccagag

SEQ ID NO: 6232 - DNA, 20 bp, Homo Sapiens
gcgacgccgcgagccagagg

SEQ ID NO: 6233 - DNA, 20 bp, Homo Sapiens
cgacgccgcgagccagagga

SEQ ID NO: 6234 - DNA, 20 bp, Homo Sapiens
gacgccgcgagccagaggat

SEQ ID NO: 6235 - DNA, 20 bp, Homo Sapiens
acgccgcgagccagaggatg

SEQ ID NO: 6236 - DNA, 20 bp, Homo Sapiens
cgccgcgagccagaggatgg

SEQ ID NO: 6237 - DNA, 20 bp, Homo Sapiens
gccgcgagccagaggatgga

SEQ ID NO: 6238 - DNA, 20 bp, Homo Sapiens
ccgcgagccagaggatggag

SEQ ID NO: 6239 - DNA, 20 bp, Homo Sapiens
cgcgagccagaggatggagc

SEQ ID NO: 6240 - DNA, 20 bp, Homo Sapiens
gcgagccagaggatggagcc

SEQ ID NO: 6241 - DNA, 20 bp, Homo Sapiens
cgagccagaggatggagccg

SEQ ID NO: 6242 - DNA, 20 bp, Homo Sapiens
gagccagaggatggagccgc

SEQ ID NO: 6243 - DNA, 20 bp, Homo Sapiens
agccagaggatggagccgcg

SEQ ID NO: 6244 - DNA, 20 bp, Homo Sapiens
gccagaggatggagccgcgg

SEQ ID NO: 6245 - DNA, 20 bp, Homo Sapiens
ccagaggatggagccgcggg

SEQ ID NO: 6246 - DNA, 20 bp, Homo Sapiens
cagaggatggagccgcgggc

SEQ ID NO: 6247 - DNA, 20 bp, Homo Sapiens
agaggatggagccgcgggcg

SEQ ID NO: 6248 - DNA, 20 bp, Homo Sapiens
gaggatggagccgcgggcgc

SEQ ID NO: 6249 - DNA, 20 bp, Homo Sapiens
aggatggagccgcgggcgcc

SEQ ID NO: 6250 - DNA, 20 bp, Homo Sapiens
ggatggagccgcgggcgccg

SEQ ID NO: 6251 - DNA, 20 bp, Homo Sapiens
gatggagccgcgggcgccgt

SEQ ID NO: 6252 - DNA, 20 bp, Homo Sapiens
atggagccgcgggcgccgtg

SEQ ID NO: 6253 - DNA, 20 bp, Homo Sapiens
tggagccgcgggcgccgtgg

SEQ ID NO: 6254 - DNA, 20 bp, Homo Sapiens
ggagccgcgggcgccgtgga

SEQ ID NO: 6255 - DNA, 20 bp, Homo Sapiens
gagccgcgggcgccgtggat

SEQ ID NO: 6256 - DNA, 20 bp, Homo Sapiens
agccgcgggcgccgtggata

SEQ ID NO: 6257 - DNA, 20 bp, Homo Sapiens
gccgcgggcgccgtggatag

SEQ ID NO: 6258 - DNA, 20 bp, Homo Sapiens
ccgcgggcgccgtggataga

SEQ ID NO: 6259 - DNA, 20 bp, Homo Sapiens
cgcgggcgccgtggatagag

SEQ ID NO: 6260 - DNA, 20 bp, Homo Sapiens
gcgggcgccgtggatagagc

SEQ ID NO: 6261 - DNA, 20 bp, Homo Sapiens
cgggcgccgtggatagagca

SEQ ID NO: 6262 - DNA, 20 bp, Homo Sapiens
gggcgccgtggatagagcag

SEQ ID NO: 6263 - DNA, 20 bp, Homo Sapiens
ggcgccgtggatagagcagg

SEQ ID NO: 6264 - DNA, 20 bp, Homo Sapiens
gcgccgtggatagagcagga

SEQ ID NO: 6265 - DNA, 20 bp, Homo Sapiens
cgccgtggatagagcaggag

SEQ ID NO: 6266 - DNA, 20 bp, Homo Sapiens
gccgtggatagagcaggagg

SEQ ID NO: 6267 - DNA, 20 bp, Homo Sapiens
ccgtggatagagcaggaggg

SEQ ID NO: 6268 - DNA, 20 bp, Homo Sapiens
cgtggatagagcaggagggt

SEQ ID NO: 6269 - DNA, 20 bp, Homo Sapiens
gtggatagagcaggagggtc

SEQ ID NO: 6270 - DNA, 20 bp, Homo Sapiens
tggatagagcaggagggtcc

SEQ ID NO: 6271 - DNA, 20 bp, Homo Sapiens
ggatagagcaggagggtccg

SEQ ID NO: 6272 - DNA, 20 bp, Homo Sapiens
gatagagcaggagggtccgg

SEQ ID NO: 6273 - DNA, 20 bp, Homo Sapiens
atagagcaggagggtccgga

SEQ ID NO: 6274 - DNA, 20 bp, Homo Sapiens
tagagcaggagggtccggag

SEQ ID NO: 6275 - DNA, 20 bp, Homo Sapiens
agagcaggagggtccggagt

SEQ ID NO: 6276 - DNA, 20 bp, Homo Sapiens
gagcaggagggtccggagta

SEQ ID NO: 6277 - DNA, 20 bp, Homo Sapiens
agcaggagggtccggagtat

SEQ ID NO: 6278 - DNA, 20 bp, Homo Sapiens
caggagggtccggagtattg

SEQ ID NO: 6279 - DNA, 20 bp, Homo Sapiens
aggagggtccggagtattgg

SEQ ID NO: 6280 - DNA, 20 bp, Homo Sapiens
ggagggtccggagtattggg

SEQ ID NO: 6281 - DNA, 20 bp, Homo Sapiens
gagggtccggagtattggga

SEQ ID NO: 6282 - DNA, 20 bp, Homo Sapiens
agggtccggagtattgggac

SEQ ID NO: 6283 - DNA, 20 bp, Homo Sapiens
gggtccggagtattgggacg

SEQ ID NO: 6284 - DNA, 20 bp, Homo Sapiens
ggtccggagtattgggacgg

SEQ ID NO: 6285 - DNA, 20 bp, Homo Sapiens
gtccggagtattgggacggg

SEQ ID NO: 6286 - DNA, 20 bp, Homo Sapiens
tccggagtattgggacgggg

SEQ ID NO: 6287 - DNA, 20 bp, Homo Sapiens
ccggagtattgggacgggga

SEQ ID NO: 6288 - DNA, 20 bp, Homo Sapiens
cggagtattgggacggggag

SEQ ID NO: 6289 - DNA, 20 bp, Homo Sapiens
ggagtattgggacggggaga

SEQ ID NO: 6290 - DNA, 20 bp, Homo Sapiens
gagtattgggacggggagac

SEQ ID NO: 6291 - DNA, 20 bp, Homo Sapiens
gtattgggacggggagacac

SEQ ID NO: 6292 - DNA, 20 bp, Homo Sapiens
tattgggacggggagacacg

SEQ ID NO: 6293 - DNA, 20 bp, Homo Sapiens
attgggacggggagacacgg

SEQ ID NO: 6294 - DNA, 20 bp, Homo Sapiens
ttgggacggggagacacgga

SEQ ID NO: 6295 - DNA, 20 bp, Homo Sapiens
tgggacggggagacacggaa

SEQ ID NO: 6296 - DNA, 20 bp, Homo Sapiens
gggacggggagacacggaaa

SEQ ID NO: 6297 - DNA, 20 bp, Homo Sapiens
gacggggagacacggaaagt

SEQ ID NO: 6298 - DNA, 20 bp, Homo Sapiens
acggggagacacggaaagtg

SEQ ID NO: 6299 - DNA, 20 bp, Homo Sapiens
cggggagacacggaaagtga

SEQ ID NO: 6300 - DNA, 20 bp, Homo Sapiens
gacacggaaagtgaaggccc

SEQ ID NO: 6301 - DNA, 20 bp, Homo Sapiens
cacggaaagtgaaggcccac

SEQ ID NO: 6302 - DNA, 20 bp, Homo Sapiens
cggaaagtgaaggcccactc

SEQ ID NO: 6303 - DNA, 20 bp, Homo Sapiens
gtgaaggcccactcacagac

SEQ ID NO: 6304 - DNA, 20 bp, Homo Sapiens
gaaggcccactcacagactc

SEQ ID NO: 6305 - DNA, 20 bp, Homo Sapiens
aggcccactcacagactcac

SEQ ID NO: 6306 - DNA, 20 bp, Homo Sapiens
ggcccactcacagactcacc

SEQ ID NO: 6307 - DNA, 20 bp, Homo Sapiens
gcccactcacagactcaccg

SEQ ID NO: 6308 - DNA, 20 bp, Homo Sapiens
cccactcacagactcaccga

SEQ ID NO: 6309 - DNA, 20 bp, Homo Sapiens
ccactcacagactcaccgag

SEQ ID NO: 6310 - DNA, 20 bp, Homo Sapiens
ctcacagactcaccgagtgg

SEQ ID NO: 6311 - DNA, 20 bp, Homo Sapiens
cacagactcaccgagtggac

SEQ ID NO: 6312 - DNA, 20 bp, Homo Sapiens
acagactcaccgagtggacc

SEQ ID NO: 6313 - DNA, 20 bp, Homo Sapiens
cagactcaccgagtggacct

SEQ ID NO: 6314 - DNA, 20 bp, Homo Sapiens
agactcaccgagtggacctg

SEQ ID NO: 6315 - DNA, 20 bp, Homo Sapiens
gactcaccgagtggacctgg

SEQ ID NO: 6316 - DNA, 20 bp, Homo Sapiens
actcaccgagtggacctggg

SEQ ID NO: 6317 - DNA, 20 bp, Homo Sapiens
ctcaccgagtggacctgggg

SEQ ID NO: 6318 - DNA, 20 bp, Homo Sapiens
tcaccgagtggacctgggga

SEQ ID NO: 6319 - DNA, 20 bp, Homo Sapiens
caccgagtggacctggggac

SEQ ID NO: 6320 - DNA, 20 bp, Homo Sapiens
accgagtggacctggggacc

SEQ ID NO: 6321 - DNA, 20 bp, Homo Sapiens
ccgagtggacctggggaccc

SEQ ID NO: 6322 - DNA, 20 bp, Homo Sapiens
cgagtggacctggggaccct

SEQ ID NO: 6323 - DNA, 20 bp, Homo Sapiens
gagtggacctggggaccctg

SEQ ID NO: 6324 - DNA, 20 bp, Homo Sapiens
agtggacctggggaccctgc

SEQ ID NO: 6325 - DNA, 20 bp, Homo Sapiens
gtggacctggggaccctgcg

SEQ ID NO: 6326 - DNA, 20 bp, Homo Sapiens
tggacctggggaccctgcgc

SEQ ID NO: 6327 - DNA, 20 bp, Homo Sapiens
ggacctggggaccctgcgcg

SEQ ID NO: 6328 - DNA, 20 bp, Homo Sapiens
gacctggggaccctgcgcgg

SEQ ID NO: 6329 - DNA, 20 bp, Homo Sapiens
acctggggaccctgcgcggc

SEQ ID NO: 6330 - DNA, 20 bp, Homo Sapiens
cctggggaccctgcgcggct

SEQ ID NO: 6331 - DNA, 20 bp, Homo Sapiens
ctggggaccctgcgcggcta

SEQ ID NO: 6332 - DNA, 20 bp, Homo Sapiens
tggggaccctgcgcggctac

SEQ ID NO: 6333 - DNA, 20 bp, Homo Sapiens
ggggaccctgcgcggctact

SEQ ID NO: 6334 - DNA, 20 bp, Homo Sapiens
gggaccctgcgcggctacta

SEQ ID NO: 6335 - DNA, 20 bp, Homo Sapiens
ggaccctgcgcggctactac

SEQ ID NO: 6336 - DNA, 20 bp, Homo Sapiens
gaccctgcgcggctactaca

SEQ ID NO: 6337 - DNA, 20 bp, Homo Sapiens
accctgcgcggctactacaa

SEQ ID NO: 6338 - DNA, 20 bp, Homo Sapiens
ccctgcgcggctactacaac

SEQ ID NO: 6339 - DNA, 20 bp, Homo Sapiens
cctgcgcggctactacaacc

SEQ ID NO: 6340 - DNA, 20 bp, Homo Sapiens
ctgcgcggctactacaacca

SEQ ID NO: 6341 - DNA, 20 bp, Homo Sapiens
tgcgcggctactacaaccag

SEQ ID NO: 6342 - DNA, 20 bp, Homo Sapiens
gcgcggctactacaaccaga

SEQ ID NO: 6343 - DNA, 20 bp, Homo Sapiens
cgcggctactacaaccagag

SEQ ID NO: 6344 - DNA, 20 bp, Homo Sapiens
gcggctactacaaccagagc

SEQ ID NO: 6345 - DNA, 20 bp, Homo Sapiens
cggctactacaaccagagcg

SEQ ID NO: 6346 - DNA, 20 bp, Homo Sapiens
actacaaccagagcgaggcc

SEQ ID NO: 6347 - DNA, 20 bp, Homo Sapiens
ctacaaccagagcgaggccg

SEQ ID NO: 6348 - DNA, 20 bp, Homo Sapiens
tacaaccagagcgaggccgg

SEQ ID NO: 6349 - DNA, 20 bp, Homo Sapiens
acaaccagagcgaggccggt

SEQ ID NO: 6350 - DNA, 20 bp, Homo Sapiens
caaccagagcgaggccggtt

SEQ ID NO: 6351 - DNA, 20 bp, Homo Sapiens
aaccagagcgaggccggttc

SEQ ID NO: 6352 - DNA, 20 bp, Homo Sapiens
accagagcgaggccggttct

SEQ ID NO: 6353 - DNA, 20 bp, Homo Sapiens
ccagagcgaggccggttctc

SEQ ID NO: 6354 - DNA, 20 bp, Homo Sapiens
cagagcgaggccggttctca

SEQ ID NO: 6355 - DNA, 20 bp, Homo Sapiens
agagcgaggccggttctcac

SEQ ID NO: 6356 - DNA, 20 bp, Homo Sapiens
gagcgaggccggttctcaca

SEQ ID NO: 6357 - DNA, 20 bp, Homo Sapiens
agcgaggccggttctcacac

SEQ ID NO: 6358 - DNA, 20 bp, Homo Sapiens
gcgaggccggttctcacacc

SEQ ID NO: 6359 - DNA, 20 bp, Homo Sapiens
cgaggccggttctcacaccg

SEQ ID NO: 6360 - DNA, 20 bp, Homo Sapiens
gaggccggttctcacaccgt

SEQ ID NO: 6361 - DNA, 20 bp, Homo Sapiens
aggccggttctcacaccgtc

SEQ ID NO: 6362 - DNA, 20 bp, Homo Sapiens
ggccggttctcacaccgtcc

SEQ ID NO: 6363 - DNA, 20 bp, Homo Sapiens
gccggttctcacaccgtcca

SEQ ID NO: 6364 - DNA, 20 bp, Homo Sapiens
ccggttctcacaccgtccag

SEQ ID NO: 6365 - DNA, 20 bp, Homo Sapiens
cggttctcacaccgtccaga

SEQ ID NO: 6366 - DNA, 20 bp, Homo Sapiens
ggttctcacaccgtccagag

SEQ ID NO: 6367 - DNA, 20 bp, Homo Sapiens
gttctcacaccgtccagagg

SEQ ID NO: 6368 - DNA, 20 bp, Homo Sapiens
ctcacaccgtccagaggatg

SEQ ID NO: 6369 - DNA, 20 bp, Homo Sapiens
ccgtccagaggatgtatggc

SEQ ID NO: 6370 - DNA, 20 bp, Homo Sapiens
ccagaggatgtatggctgcg

SEQ ID NO: 6371 - DNA, 20 bp, Homo Sapiens
gaggatgtatggctgcgacg

SEQ ID NO: 6372 - DNA, 20 bp, Homo Sapiens
ggatgtatggctgcgacgtg

SEQ ID NO: 6373 - DNA, 20 bp, Homo Sapiens
gatgtatggctgcgacgtgg

SEQ ID NO: 6374 - DNA, 20 bp, Homo Sapiens
atgtatggctgcgacgtggg

SEQ ID NO: 6375 - DNA, 20 bp, Homo Sapiens
tgtatggctgcgacgtgggg

SEQ ID NO: 6376 - DNA, 20 bp, Homo Sapiens
gtatggctgcgacgtggggt

SEQ ID NO: 6377 - DNA, 20 bp, Homo Sapiens
tatggctgcgacgtggggtc

SEQ ID NO: 6378 - DNA, 20 bp, Homo Sapiens
atggctgcgacgtggggtcg

SEQ ID NO: 6379 - DNA, 20 bp, Homo Sapiens
tggctgcgacgtggggtcgg

SEQ ID NO: 6380 - DNA, 20 bp, Homo Sapiens
ggctgcgacgtggggtcgga

SEQ ID NO: 6381 - DNA, 20 bp, Homo Sapiens
gctgcgacgtggggtcggac

SEQ ID NO: 6382 - DNA, 20 bp, Homo Sapiens
ctgcgacgtggggtcggact

SEQ ID NO: 6383 - DNA, 20 bp, Homo Sapiens
tgcgacgtggggtcggactg

SEQ ID NO: 6384 - DNA, 20 bp, Homo Sapiens
gcgacgtggggtcggactgg

SEQ ID NO: 6385 - DNA, 20 bp, Homo Sapiens
cgacgtggggtcggactggc

SEQ ID NO: 6386 - DNA, 20 bp, Homo Sapiens
gacgtggggtcggactggcg

SEQ ID NO: 6387 - DNA, 20 bp, Homo Sapiens
acgtggggtcggactggcgc

SEQ ID NO: 6388 - DNA, 20 bp, Homo Sapiens
cgtggggtcggactggcgct

SEQ ID NO: 6389 - DNA, 20 bp, Homo Sapiens
gtggggtcggactggcgctt

SEQ ID NO: 6390 - DNA, 20 bp, Homo Sapiens
tggggtcggactggcgcttc

SEQ ID NO: 6391 - DNA, 20 bp, Homo Sapiens
ggggtcggactggcgcttcc

SEQ ID NO: 6392 - DNA, 20 bp, Homo Sapiens
gggtcggactggcgcttcct

SEQ ID NO: 6393 - DNA, 20 bp, Homo Sapiens
ggtcggactggcgcttcctc

SEQ ID NO: 6394 - DNA, 20 bp, Homo Sapiens
gtcggactggcgcttcctcc

SEQ ID NO: 6395 - DNA, 20 bp, Homo Sapiens
tcggactggcgcttcctccg

SEQ ID NO: 6396 - DNA, 20 bp, Homo Sapiens
cggactggcgcttcctccgc

SEQ ID NO: 6397 - DNA, 20 bp, Homo Sapiens
ggactggcgcttcctccgcg

SEQ ID NO: 6398 - DNA, 20 bp, Homo Sapiens
gactggcgcttcctccgcgg

SEQ ID NO: 6399 - DNA, 20 bp, Homo Sapiens
actggcgcttcctccgcggg

SEQ ID NO: 6400 - DNA, 20 bp, Homo Sapiens
ctggcgcttcctccgcgggt

SEQ ID NO: 6401 - DNA, 20 bp, Homo Sapiens
tggcgcttcctccgcgggta

SEQ ID NO: 6402 - DNA, 20 bp, Homo Sapiens
ggcgcttcctccgcgggtac

SEQ ID NO: 6403 - DNA, 20 bp, Homo Sapiens
gcgcttcctccgcgggtacc

SEQ ID NO: 6404 - DNA, 20 bp, Homo Sapiens
cgcttcctccgcgggtacca

SEQ ID NO: 6405 - DNA, 20 bp, Homo Sapiens
gcttcctccgcgggtaccac

SEQ ID NO: 6406 - DNA, 20 bp, Homo Sapiens
cttcctccgcgggtaccacc

SEQ ID NO: 6407 - DNA, 20 bp, Homo Sapiens
ttcctccgcgggtaccacca

SEQ ID NO: 6408 - DNA, 20 bp, Homo Sapiens
tcctccgcgggtaccaccag

SEQ ID NO: 6409 - DNA, 20 bp, Homo Sapiens
cctccgcgggtaccaccagt

SEQ ID NO: 6410 - DNA, 20 bp, Homo Sapiens
ctccgcgggtaccaccagta

SEQ ID NO: 6411 - DNA, 20 bp, Homo Sapiens
tccgcgggtaccaccagtac

SEQ ID NO: 6412 - DNA, 20 bp, Homo Sapiens
ccgcgggtaccaccagtacg

SEQ ID NO: 6413 - DNA, 20 bp, Homo Sapiens
cgcgggtaccaccagtacgc

SEQ ID NO: 6414 - DNA, 20 bp, Homo Sapiens
gcgggtaccaccagtacgcc

SEQ ID NO: 6415 - DNA, 20 bp, Homo Sapiens
cgggtaccaccagtacgcct

SEQ ID NO: 6416 - DNA, 20 bp, Homo Sapiens
gggtaccaccagtacgccta

SEQ ID NO: 6417 - DNA, 20 bp, Homo Sapiens
ggtaccaccagtacgcctac

SEQ ID NO: 6418 - DNA, 20 bp, Homo Sapiens
gtaccaccagtacgcctacg

SEQ ID NO: 6419 - DNA, 20 bp, Homo Sapiens
accaccagtacgcctacgac

SEQ ID NO: 6420 - DNA, 20 bp, Homo Sapiens
ccaccagtacgcctacgacg

SEQ ID NO: 6421 - DNA, 20 bp, Homo Sapiens
caccagtacgcctacgacgg

SEQ ID NO: 6422 - DNA, 20 bp, Homo Sapiens
accagtacgcctacgacggc

SEQ ID NO: 6423 - DNA, 20 bp, Homo Sapiens
ccagtacgcctacgacggca

SEQ ID NO: 6424 - DNA, 20 bp, Homo Sapiens
cagtacgcctacgacggcaa

SEQ ID NO: 6425 - DNA, 20 bp, Homo Sapiens
agtacgcctacgacggcaag

SEQ ID NO: 6426 - DNA, 20 bp, Homo Sapiens
gtacgcctacgacggcaagg

SEQ ID NO: 6427 - DNA, 20 bp, Homo Sapiens
tacgcctacgacggcaagga

SEQ ID NO: 6428 - DNA, 20 bp, Homo Sapiens
acgcctacgacggcaaggat

SEQ ID NO: 6429 - DNA, 20 bp, Homo Sapiens
cgcctacgacggcaaggatt

SEQ ID NO: 6430 - DNA, 20 bp, Homo Sapiens
cggcaaggattacatcgccc

SEQ ID NO: 6431 - DNA, 20 bp, Homo Sapiens
catcgccctgaaagaggacc

SEQ ID NO: 6432 - DNA, 20 bp, Homo Sapiens
tcgccctgaaagaggacctg

SEQ ID NO: 6433 - DNA, 20 bp, Homo Sapiens
cgccctgaaagaggacctgc

SEQ ID NO: 6434 - DNA, 20 bp, Homo Sapiens
gccctgaaagaggacctgcg

SEQ ID NO: 6435 - DNA, 20 bp, Homo Sapiens
ccctgaaagaggacctgcgc

SEQ ID NO: 6436 - DNA, 20 bp, Homo Sapiens
cctgaaagaggacctgcgct

SEQ ID NO: 6437 - DNA, 20 bp, Homo Sapiens
ctgaaagaggacctgcgctc

SEQ ID NO: 6438 - DNA, 20 bp, Homo Sapiens
aagaggacctgcgctcttgg

SEQ ID NO: 6439 - DNA, 20 bp, Homo Sapiens
agaggacctgcgctcttgga

SEQ ID NO: 6440 - DNA, 20 bp, Homo Sapiens
gaggacctgcgctcttggac

SEQ ID NO: 6441 - DNA, 20 bp, Homo Sapiens
aggacctgcgctcttggacc

SEQ ID NO: 6442 - DNA, 20 bp, Homo Sapiens
ggacctgcgctcttggaccg

SEQ ID NO: 6443 - DNA, 20 bp, Homo Sapiens
gacctgcgctcttggaccgc

SEQ ID NO: 6444 - DNA, 20 bp, Homo Sapiens
acctgcgctcttggaccgcg

SEQ ID NO: 6445 - DNA, 20 bp, Homo Sapiens
cctgcgctcttggaccgcgg

SEQ ID NO: 6446 - DNA, 20 bp, Homo Sapiens
ctgcgctcttggaccgcggc

SEQ ID NO: 6447 - DNA, 20 bp, Homo Sapiens
tgcgctcttggaccgcggcg

SEQ ID NO: 6448 - DNA, 20 bp, Homo Sapiens
gcgctcttggaccgcggcgg

SEQ ID NO: 6449 - DNA, 20 bp, Homo Sapiens
cgctcttggaccgcggcgga

SEQ ID NO: 6450 - DNA, 20 bp, Homo Sapiens
gctcttggaccgcggcggac

SEQ ID NO: 6451 - DNA, 20 bp, Homo Sapiens
ctcttggaccgcggcggaca

SEQ ID NO: 6452 - DNA, 20 bp, Homo Sapiens
tcttggaccgcggcggacat

SEQ ID NO: 6453 - DNA, 20 bp, Homo Sapiens
cttggaccgcggcggacatg

SEQ ID NO: 6454 - DNA, 20 bp, Homo Sapiens
ttggaccgcggcggacatgg

SEQ ID NO: 6455 - DNA, 20 bp, Homo Sapiens
tggaccgcggcggacatggc

SEQ ID NO: 6456 - DNA, 20 bp, Homo Sapiens
ggaccgcggcggacatggca

SEQ ID NO: 6457 - DNA, 20 bp, Homo Sapiens
gaccgcggcggacatggcag

SEQ ID NO: 6458 - DNA, 20 bp, Homo Sapiens
accgcggcggacatggcagc

SEQ ID NO: 6459 - DNA, 20 bp, Homo Sapiens
ccgcggcggacatggcagct

SEQ ID NO: 6460 - DNA, 20 bp, Homo Sapiens
cgcggcggacatggcagctc

SEQ ID NO: 6461 - DNA, 20 bp, Homo Sapiens
gcggcggacatggcagctca

SEQ ID NO: 6462 - DNA, 20 bp, Homo Sapiens
cggcggacatggcagctcag

SEQ ID NO: 6463 - DNA, 20 bp, Homo Sapiens
ggcggacatggcagctcaga

SEQ ID NO: 6464 - DNA, 20 bp, Homo Sapiens
gcggacatggcagctcagac

SEQ ID NO: 6465 - DNA, 20 bp, Homo Sapiens
cggacatggcagctcagacc

SEQ ID NO: 6466 - DNA, 20 bp, Homo Sapiens
ggacatggcagctcagacca

SEQ ID NO: 6467 - DNA, 20 bp, Homo Sapiens
gacatggcagctcagaccac

SEQ ID NO: 6468 - DNA, 20 bp, Homo Sapiens
acatggcagctcagaccacc

SEQ ID NO: 6469 - DNA, 20 bp, Homo Sapiens
catggcagctcagaccacca

SEQ ID NO: 6470 - DNA, 20 bp, Homo Sapiens
tggcagctcagaccaccaag

SEQ ID NO: 6471 - DNA, 20 bp, Homo Sapiens
ggcagctcagaccaccaagc

SEQ ID NO: 6472 - DNA, 20 bp, Homo Sapiens
gcagctcagaccaccaagca

SEQ ID NO: 6473 - DNA, 20 bp, Homo Sapiens
cagctcagaccaccaagcac

SEQ ID NO: 6474 - DNA, 20 bp, Homo Sapiens
gaccaccaagcacaagtggg

SEQ ID NO: 6475 - DNA, 20 bp, Homo Sapiens
ccaccaagcacaagtgggag

SEQ ID NO: 6476 - DNA, 20 bp, Homo Sapiens
caccaagcacaagtgggagg

SEQ ID NO: 6477 - DNA, 20 bp, Homo Sapiens
accaagcacaagtgggaggc

SEQ ID NO: 6478 - DNA, 20 bp, Homo Sapiens
ccaagcacaagtgggaggcg

SEQ ID NO: 6479 - DNA, 20 bp, Homo Sapiens
caagcacaagtgggaggcgg

SEQ ID NO: 6480 - DNA, 20 bp, Homo Sapiens
aagcacaagtgggaggcggc

SEQ ID NO: 6481 - DNA, 20 bp, Homo Sapiens
agcacaagtgggaggcggcc

SEQ ID NO: 6482 - DNA, 20 bp, Homo Sapiens
gcacaagtgggaggcggccc

SEQ ID NO: 6483 - DNA, 20 bp, Homo Sapiens
cacaagtgggaggcggccca

SEQ ID NO: 6484 - DNA, 20 bp, Homo Sapiens
acaagtgggaggcggcccat

SEQ ID NO: 6485 - DNA, 20 bp, Homo Sapiens
caagtgggaggcggcccatg

SEQ ID NO: 6486 - DNA, 20 bp, Homo Sapiens
aagtgggaggcggcccatgt

SEQ ID NO: 6487 - DNA, 20 bp, Homo Sapiens
agtgggaggcggcccatgtg

SEQ ID NO: 6488 - DNA, 20 bp, Homo Sapiens
gtgggaggcggcccatgtgg

SEQ ID NO: 6489 - DNA, 20 bp, Homo Sapiens
tgggaggcggcccatgtggc

SEQ ID NO: 6490 - DNA, 20 bp, Homo Sapiens
gggaggcggcccatgtggcg

SEQ ID NO: 6491 - DNA, 20 bp, Homo Sapiens
ggaggcggcccatgtggcgg

SEQ ID NO: 6492 - DNA, 20 bp, Homo Sapiens
gaggcggcccatgtggcgga

SEQ ID NO: 6493 - DNA, 20 bp, Homo Sapiens
aggcggcccatgtggcggag

SEQ ID NO: 6494 - DNA, 20 bp, Homo Sapiens
ggcggcccatgtggcggagc

SEQ ID NO: 6495 - DNA, 20 bp, Homo Sapiens
gcggcccatgtggcggagca

SEQ ID NO: 6496 - DNA, 20 bp, Homo Sapiens
cggcccatgtggcggagcag

SEQ ID NO: 6497 - DNA, 20 bp, Homo Sapiens
ggcccatgtggcggagcagt

SEQ ID NO: 6498 - DNA, 20 bp, Homo Sapiens
gcccatgtggcggagcagtt

SEQ ID NO: 6499 - DNA, 20 bp, Homo Sapiens
cccatgtggcggagcagttg

SEQ ID NO: 6500 - DNA, 20 bp, Homo Sapiens
ccatgtggcggagcagttga

SEQ ID NO: 6501 - DNA, 20 bp, Homo Sapiens
catgtggcggagcagttgag

SEQ ID NO: 6502 - DNA, 20 bp, Homo Sapiens
tgtggcggagcagttgagag

SEQ ID NO: 6503 - DNA, 20 bp, Homo Sapiens
gtggcggagcagttgagagc

SEQ ID NO: 6504 - DNA, 20 bp, Homo Sapiens
tggcggagcagttgagagcc

SEQ ID NO: 6505 - DNA, 20 bp, Homo Sapiens
ggcggagcagttgagagcct

SEQ ID NO: 6506 - DNA, 20 bp, Homo Sapiens
gcggagcagttgagagccta

SEQ ID NO: 6507 - DNA, 20 bp, Homo Sapiens
cggagcagttgagagcctac

SEQ ID NO: 6508 - DNA, 20 bp, Homo Sapiens
ggagcagttgagagcctacc

SEQ ID NO: 6509 - DNA, 20 bp, Homo Sapiens
gcagttgagagcctacctgg

SEQ ID NO: 6510 - DNA, 20 bp, Homo Sapiens
gttgagagcctacctggagg

SEQ ID NO: 6511 - DNA, 20 bp, Homo Sapiens
ttgagagcctacctggaggg

SEQ ID NO: 6512 - DNA, 20 bp, Homo Sapiens
tgagagcctacctggagggc

SEQ ID NO: 6513 - DNA, 20 bp, Homo Sapiens
gagagcctacctggagggca

SEQ ID NO: 6514 - DNA, 20 bp, Homo Sapiens
agagcctacctggagggcac

SEQ ID NO: 6515 - DNA, 20 bp, Homo Sapiens
gagcctacctggagggcacg

SEQ ID NO: 6516 - DNA, 20 bp, Homo Sapiens
agcctacctggagggcacgt

SEQ ID NO: 6517 - DNA, 20 bp, Homo Sapiens
gcctacctggagggcacgtg

SEQ ID NO: 6518 - DNA, 20 bp, Homo Sapiens
cctacctggagggcacgtgc

SEQ ID NO: 6519 - DNA, 20 bp, Homo Sapiens
ctacctggagggcacgtgcg

SEQ ID NO: 6520 - DNA, 20 bp, Homo Sapiens
tacctggagggcacgtgcgt

SEQ ID NO: 6521 - DNA, 20 bp, Homo Sapiens
acctggagggcacgtgcgtg

SEQ ID NO: 6522 - DNA, 20 bp, Homo Sapiens
cctggagggcacgtgcgtgg

SEQ ID NO: 6523 - DNA, 20 bp, Homo Sapiens
ctggagggcacgtgcgtgga

SEQ ID NO: 6524 - DNA, 20 bp, Homo Sapiens
tggagggcacgtgcgtggag

SEQ ID NO: 6525 - DNA, 20 bp, Homo Sapiens
ggagggcacgtgcgtggagt

SEQ ID NO: 6526 - DNA, 20 bp, Homo Sapiens
gagggcacgtgcgtggagtg

SEQ ID NO: 6527 - DNA, 20 bp, Homo Sapiens
agggcacgtgcgtggagtgg

SEQ ID NO: 6528 - DNA, 20 bp, Homo Sapiens
gggcacgtgcgtggagtggc

SEQ ID NO: 6529 - DNA, 20 bp, Homo Sapiens
ggcacgtgcgtggagtggct

SEQ ID NO: 6530 - DNA, 20 bp, Homo Sapiens
gcacgtgcgtggagtggctc

SEQ ID NO: 6531 - DNA, 20 bp, Homo Sapiens
cacgtgcgtggagtggctcc

SEQ ID NO: 6532 - DNA, 20 bp, Homo Sapiens
acgtgcgtggagtggctccg

SEQ ID NO: 6533 - DNA, 20 bp, Homo Sapiens
cgtgcgtggagtggctccgc

SEQ ID NO: 6534 - DNA, 20 bp, Homo Sapiens
gtgcgtggagtggctccgca

SEQ ID NO: 6535 - DNA, 20 bp, Homo Sapiens
tgcgtggagtggctccgcag

SEQ ID NO: 6536 - DNA, 20 bp, Homo Sapiens
gcgtggagtggctccgcaga

SEQ ID NO: 6537 - DNA, 20 bp, Homo Sapiens
cgtggagtggctccgcagat

SEQ ID NO: 6538 - DNA, 20 bp, Homo Sapiens
gtggagtggctccgcagata

SEQ ID NO: 6539 - DNA, 20 bp, Homo Sapiens
tggagtggctccgcagatac

SEQ ID NO: 6540 - DNA, 20 bp, Homo Sapiens
ggagtggctccgcagatacc

SEQ ID NO: 6541 - DNA, 20 bp, Homo Sapiens
gagtggctccgcagatacct

SEQ ID NO: 6542 - DNA, 20 bp, Homo Sapiens
agtggctccgcagatacctg

SEQ ID NO: 6543 - DNA, 20 bp, Homo Sapiens
gtggctccgcagatacctgg

SEQ ID NO: 6544 - DNA, 20 bp, Homo Sapiens
tggctccgcagatacctgga

SEQ ID NO: 6545 - DNA, 20 bp, Homo Sapiens
ggctccgcagatacctggag

SEQ ID NO: 6546 - DNA, 20 bp, Homo Sapiens
gctccgcagatacctggaga

SEQ ID NO: 6547 - DNA, 20 bp, Homo Sapiens
ccgcagatacctggagaacg

SEQ ID NO: 6548 - DNA, 20 bp, Homo Sapiens
cgcagatacctggagaacgg

SEQ ID NO: 6549 - DNA, 20 bp, Homo Sapiens
gcagatacctggagaacggg

SEQ ID NO: 6550 - DNA, 20 bp, Homo Sapiens
acctggagaacgggaaggag

SEQ ID NO: 6551 - DNA, 20 bp, Homo Sapiens
cctggagaacgggaaggaga

SEQ ID NO: 6552 - DNA, 20 bp, Homo Sapiens
ctggagaacgggaaggagac

SEQ ID NO: 6553 - DNA, 20 bp, Homo Sapiens
tggagaacgggaaggagacg

SEQ ID NO: 6554 - DNA, 20 bp, Homo Sapiens
ggagaacgggaaggagacgc

SEQ ID NO: 6555 - DNA, 20 bp, Homo Sapiens
gagaacgggaaggagacgct

SEQ ID NO: 6556 - DNA, 20 bp, Homo Sapiens
agaacgggaaggagacgctg

SEQ ID NO: 6557 - DNA, 20 bp, Homo Sapiens
gaacgggaaggagacgctgc

SEQ ID NO: 6558 - DNA, 20 bp, Homo Sapiens
aacgggaaggagacgctgca

SEQ ID NO: 6559 - DNA, 20 bp, Homo Sapiens
acgggaaggagacgctgcag

SEQ ID NO: 6560 - DNA, 20 bp, Homo Sapiens
cgggaaggagacgctgcagc

SEQ ID NO: 6561 - DNA, 20 bp, Homo Sapiens
gggaaggagacgctgcagcg

SEQ ID NO: 6562 - DNA, 20 bp, Homo Sapiens
ggaaggagacgctgcagcgc

SEQ ID NO: 6563 - DNA, 20 bp, Homo Sapiens
gaaggagacgctgcagcgca

SEQ ID NO: 6564 - DNA, 20 bp, Homo Sapiens
aaggagacgctgcagcgcac

SEQ ID NO: 6565 - DNA, 20 bp, Homo Sapiens
aggagacgctgcagcgcacg

SEQ ID NO: 6566 - DNA, 20 bp, Homo Sapiens
ggagacgctgcagcgcacgg

SEQ ID NO: 6567 - DNA, 20 bp, Homo Sapiens
gagacgctgcagcgcacgga

SEQ ID NO: 6568 - DNA, 20 bp, Homo Sapiens
agacgctgcagcgcacggac

SEQ ID NO: 6569 - DNA, 20 bp, Homo Sapiens
gacgctgcagcgcacggacg

SEQ ID NO: 6570 - DNA, 20 bp, Homo Sapiens
acgctgcagcgcacggacgc

SEQ ID NO: 6571 - DNA, 20 bp, Homo Sapiens
cgctgcagcgcacggacgcc

SEQ ID NO: 6572 - DNA, 20 bp, Homo Sapiens
gctgcagcgcacggacgccc

SEQ ID NO: 6573 - DNA, 20 bp, Homo Sapiens
ctgcagcgcacggacgcccc

SEQ ID NO: 6574 - DNA, 20 bp, Homo Sapiens
tgcagcgcacggacgccccc

SEQ ID NO: 6575 - DNA, 20 bp, Homo Sapiens
gcagcgcacggacgccccca

SEQ ID NO: 6576 - DNA, 20 bp, Homo Sapiens
cagcgcacggacgcccccaa

SEQ ID NO: 6577 - DNA, 20 bp, Homo Sapiens
agcgcacggacgcccccaaa

SEQ ID NO: 6578 - DNA, 20 bp, Homo Sapiens
gcgcacggacgcccccaaaa

SEQ ID NO: 6579 - DNA, 20 bp, Homo Sapiens
cgcacggacgcccccaaaac

SEQ ID NO: 6580 - DNA, 20 bp, Homo Sapiens
gcacggacgcccccaaaacg

SEQ ID NO: 6581 - DNA, 20 bp, Homo Sapiens
cacggacgcccccaaaacgc

SEQ ID NO: 6582 - DNA, 20 bp, Homo Sapiens
acggacgcccccaaaacgca

SEQ ID NO: 6583 - DNA, 20 bp, Homo Sapiens
cggacgcccccaaaacgcat

SEQ ID NO: 6584 - DNA, 20 bp, Homo Sapiens
ggacgcccccaaaacgcata

SEQ ID NO: 6585 - DNA, 20 bp, Homo Sapiens
gactcaccacgctgtctctg

SEQ ID NO: 6586 - DNA, 20 bp, Homo Sapiens
ctcaccacgctgtctctgac

SEQ ID NO: 6587 - DNA, 20 bp, Homo Sapiens
tcaccacgctgtctctgacc

SEQ ID NO: 6588 - DNA, 20 bp, Homo Sapiens
caccacgctgtctctgacca

SEQ ID NO: 6589 - DNA, 20 bp, Homo Sapiens
ccacgctgtctctgaccatg

SEQ ID NO: 6590 - DNA, 20 bp, Homo Sapiens
ctctgaccatgaagccaccc

SEQ ID NO: 6591 - DNA, 20 bp, Homo Sapiens
ctgaccatgaagccaccctg

SEQ ID NO: 6592 - DNA, 20 bp, Homo Sapiens
gaccatgaagccaccctgag

SEQ ID NO: 6593 - DNA, 20 bp, Homo Sapiens
accatgaagccaccctgagg

SEQ ID NO: 6594 - DNA, 20 bp, Homo Sapiens
ccatgaagccaccctgaggt

SEQ ID NO: 6595 - DNA, 20 bp, Homo Sapiens
catgaagccaccctgaggtg

SEQ ID NO: 6596 - DNA, 20 bp, Homo Sapiens
atgaagccaccctgaggtgc

SEQ ID NO: 6597 - DNA, 20 bp, Homo Sapiens
tgaagccaccctgaggtgct

SEQ ID NO: 6598 - DNA, 20 bp, Homo Sapiens
gaagccaccctgaggtgctg

SEQ ID NO: 6599 - DNA, 20 bp, Homo Sapiens
aagccaccctgaggtgctgg

SEQ ID NO: 6600 - DNA, 20 bp, Homo Sapiens
agccaccctgaggtgctggg

SEQ ID NO: 6601 - DNA, 20 bp, Homo Sapiens
gccaccctgaggtgctgggc

SEQ ID NO: 6602 - DNA, 20 bp, Homo Sapiens
ccaccctgaggtgctgggcc

SEQ ID NO: 6603 - DNA, 20 bp, Homo Sapiens
caccctgaggtgctgggccc

SEQ ID NO: 6604 - DNA, 20 bp, Homo Sapiens
accctgaggtgctgggccct

SEQ ID NO: 6605 - DNA, 20 bp, Homo Sapiens
ccctgaggtgctgggccctg

SEQ ID NO: 6606 - DNA, 20 bp, Homo Sapiens
cctgaggtgctgggccctga

SEQ ID NO: 6607 - DNA, 20 bp, Homo Sapiens
ctgaggtgctgggccctgag

SEQ ID NO: 6608 - DNA, 20 bp, Homo Sapiens
tgaggtgctgggccctgagc

SEQ ID NO: 6609 - DNA, 20 bp, Homo Sapiens
gaggtgctgggccctgagct

SEQ ID NO: 6610 - DNA, 20 bp, Homo Sapiens
aggtgctgggccctgagctt

SEQ ID NO: 6611 - DNA, 20 bp, Homo Sapiens
ggtgctgggccctgagcttc

SEQ ID NO: 6612 - DNA, 20 bp, Homo Sapiens
gtgctgggccctgagcttct

SEQ ID NO: 6613 - DNA, 20 bp, Homo Sapiens
tgctgggccctgagcttcta

SEQ ID NO: 6614 - DNA, 20 bp, Homo Sapiens
gctgggccctgagcttctac

SEQ ID NO: 6615 - DNA, 20 bp, Homo Sapiens
ctgggccctgagcttctacc

SEQ ID NO: 6616 - DNA, 20 bp, Homo Sapiens
tgggccctgagcttctaccc

SEQ ID NO: 6617 - DNA, 20 bp, Homo Sapiens
gggccctgagcttctaccct

SEQ ID NO: 6618 - DNA, 20 bp, Homo Sapiens
ggccctgagcttctaccctg

SEQ ID NO: 6619 - DNA, 20 bp, Homo Sapiens
gccctgagcttctaccctgc

SEQ ID NO: 6620 - DNA, 20 bp, Homo Sapiens
ccctgagcttctaccctgcg

SEQ ID NO: 6621 - DNA, 20 bp, Homo Sapiens
cctgagcttctaccctgcgg

SEQ ID NO: 6622 - DNA, 20 bp, Homo Sapiens
ctgagcttctaccctgcgga

SEQ ID NO: 6623 - DNA, 20 bp, Homo Sapiens
tgagcttctaccctgcggag

SEQ ID NO: 6624 - DNA, 20 bp, Homo Sapiens
gagcttctaccctgcggaga

SEQ ID NO: 6625 - DNA, 20 bp, Homo Sapiens
gcttctaccctgcggagatc

SEQ ID NO: 6626 - DNA, 20 bp, Homo Sapiens
ctaccctgcggagatcacac

SEQ ID NO: 6627 - DNA, 20 bp, Homo Sapiens
accctgcggagatcacactg

SEQ ID NO: 6628 - DNA, 20 bp, Homo Sapiens
ccctgcggagatcacactga

SEQ ID NO: 6629 - DNA, 20 bp, Homo Sapiens
cctgcggagatcacactgac

SEQ ID NO: 6630 - DNA, 20 bp, Homo Sapiens
ctgcggagatcacactgacc

SEQ ID NO: 6631 - DNA, 20 bp, Homo Sapiens
gcggagatcacactgacctg

SEQ ID NO: 6632 - DNA, 20 bp, Homo Sapiens
cggagatcacactgacctgg

SEQ ID NO: 6633 - DNA, 20 bp, Homo Sapiens
ggagatcacactgacctggc

SEQ ID NO: 6634 - DNA, 20 bp, Homo Sapiens
gatcacactgacctggcagc

SEQ ID NO: 6635 - DNA, 20 bp, Homo Sapiens
atcacactgacctggcagcg

SEQ ID NO: 6636 - DNA, 20 bp, Homo Sapiens
tcacactgacctggcagcgg

SEQ ID NO: 6637 - DNA, 20 bp, Homo Sapiens
cacactgacctggcagcggg

SEQ ID NO: 6638 - DNA, 20 bp, Homo Sapiens
acactgacctggcagcggga

SEQ ID NO: 6639 - DNA, 20 bp, Homo Sapiens
cactgacctggcagcgggat

SEQ ID NO: 6640 - DNA, 20 bp, Homo Sapiens
actgacctggcagcgggatg

SEQ ID NO: 6641 - DNA, 20 bp, Homo Sapiens
ctgacctggcagcgggatgg

SEQ ID NO: 6642 - DNA, 20 bp, Homo Sapiens
tgacctggcagcgggatggg

SEQ ID NO: 6643 - DNA, 20 bp, Homo Sapiens
gacctggcagcgggatgggg

SEQ ID NO: 6644 - DNA, 20 bp, Homo Sapiens
acctggcagcgggatgggga

SEQ ID NO: 6645 - DNA, 20 bp, Homo Sapiens
cctggcagcgggatggggag

SEQ ID NO: 6646 - DNA, 20 bp, Homo Sapiens
ctggcagcgggatggggagg

SEQ ID NO: 6647 - DNA, 20 bp, Homo Sapiens
tggcagcgggatggggagga

SEQ ID NO: 6648 - DNA, 20 bp, Homo Sapiens
ggcagcgggatggggaggac

SEQ ID NO: 6649 - DNA, 20 bp, Homo Sapiens
gcagcgggatggggaggacc

SEQ ID NO: 6650 - DNA, 20 bp, Homo Sapiens
cagcgggatggggaggacca

SEQ ID NO: 6651 - DNA, 20 bp, Homo Sapiens
agcgggatggggaggaccag

SEQ ID NO: 6652 - DNA, 20 bp, Homo Sapiens
gcgggatggggaggaccaga

SEQ ID NO: 6653 - DNA, 20 bp, Homo Sapiens
cgggatggggaggaccagac

SEQ ID NO: 6654 - DNA, 20 bp, Homo Sapiens
gggatggggaggaccagacc

SEQ ID NO: 6655 - DNA, 20 bp, Homo Sapiens
ggatggggaggaccagaccc

SEQ ID NO: 6656 - DNA, 20 bp, Homo Sapiens
gatggggaggaccagaccca

SEQ ID NO: 6657 - DNA, 20 bp, Homo Sapiens
atggggaggaccagacccag

SEQ ID NO: 6658 - DNA, 20 bp, Homo Sapiens
tggggaggaccagacccagg

SEQ ID NO: 6659 - DNA, 20 bp, Homo Sapiens
ggggaggaccagacccagga

SEQ ID NO: 6660 - DNA, 20 bp, Homo Sapiens
gggaggaccagacccaggac

SEQ ID NO: 6661 - DNA, 20 bp, Homo Sapiens
ggaggaccagacccaggaca

SEQ ID NO: 6662 - DNA, 20 bp, Homo Sapiens
gaggaccagacccaggacac

SEQ ID NO: 6663 - DNA, 20 bp, Homo Sapiens
aggaccagacccaggacacg

SEQ ID NO: 6664 - DNA, 20 bp, Homo Sapiens
ggaccagacccaggacacgg

SEQ ID NO: 6665 - DNA, 20 bp, Homo Sapiens
gaccagacccaggacacgga

SEQ ID NO: 6666 - DNA, 20 bp, Homo Sapiens
accagacccaggacacggag

SEQ ID NO: 6667 - DNA, 20 bp, Homo Sapiens
ccagacccaggacacggagc

SEQ ID NO: 6668 - DNA, 20 bp, Homo Sapiens
cagacccaggacacggagct

SEQ ID NO: 6669 - DNA, 20 bp, Homo Sapiens
agacccaggacacggagctc

SEQ ID NO: 6670 - DNA, 20 bp, Homo Sapiens
gacccaggacacggagctcg

SEQ ID NO: 6671 - DNA, 20 bp, Homo Sapiens
acccaggacacggagctcgt

SEQ ID NO: 6672 - DNA, 20 bp, Homo Sapiens
cccaggacacggagctcgtg

SEQ ID NO: 6673 - DNA, 20 bp, Homo Sapiens
ccaggacacggagctcgtgg

SEQ ID NO: 6674 - DNA, 20 bp, Homo Sapiens
caggacacggagctcgtgga

SEQ ID NO: 6675 - DNA, 20 bp, Homo Sapiens
aggacacggagctcgtggag

SEQ ID NO: 6676 - DNA, 20 bp, Homo Sapiens
ggacacggagctcgtggaga

SEQ ID NO: 6677 - DNA, 20 bp, Homo Sapiens
gacacggagctcgtggagac

SEQ ID NO: 6678 - DNA, 20 bp, Homo Sapiens
acacggagctcgtggagacc

SEQ ID NO: 6679 - DNA, 20 bp, Homo Sapiens
cacggagctcgtggagacca

SEQ ID NO: 6680 - DNA, 20 bp, Homo Sapiens
acggagctcgtggagaccag

SEQ ID NO: 6681 - DNA, 20 bp, Homo Sapiens
cggagctcgtggagaccagg

SEQ ID NO: 6682 - DNA, 20 bp, Homo Sapiens
ggagctcgtggagaccaggc

SEQ ID NO: 6683 - DNA, 20 bp, Homo Sapiens
gagctcgtggagaccaggcc

SEQ ID NO: 6684 - DNA, 20 bp, Homo Sapiens
agctcgtggagaccaggcct

SEQ ID NO: 6685 - DNA, 20 bp, Homo Sapiens
gctcgtggagaccaggcctg

SEQ ID NO: 6686 - DNA, 20 bp, Homo Sapiens
ctcgtggagaccaggcctgc

SEQ ID NO: 6687 - DNA, 20 bp, Homo Sapiens
tcgtggagaccaggcctgca

SEQ ID NO: 6688 - DNA, 20 bp, Homo Sapiens
cgtggagaccaggcctgcag

SEQ ID NO: 6689 - DNA, 20 bp, Homo Sapiens
gtggagaccaggcctgcagg

SEQ ID NO: 6690 - DNA, 20 bp, Homo Sapiens
tggagaccaggcctgcaggg

SEQ ID NO: 6691 - DNA, 20 bp, Homo Sapiens
ggagaccaggcctgcagggg

SEQ ID NO: 6692 - DNA, 20 bp, Homo Sapiens
gagaccaggcctgcagggga

SEQ ID NO: 6693 - DNA, 20 bp, Homo Sapiens
agaccaggcctgcaggggat

SEQ ID NO: 6694 - DNA, 20 bp, Homo Sapiens
gaccaggcctgcaggggatg

SEQ ID NO: 6695 - DNA, 20 bp, Homo Sapiens
accaggcctgcaggggatgg

SEQ ID NO: 6696 - DNA, 20 bp, Homo Sapiens
ccaggcctgcaggggatgga

SEQ ID NO: 6697 - DNA, 20 bp, Homo Sapiens
caggcctgcaggggatggaa

SEQ ID NO: 6698 - DNA, 20 bp, Homo Sapiens
aggcctgcaggggatggaac

SEQ ID NO: 6699 - DNA, 20 bp, Homo Sapiens
ggcctgcaggggatggaacc

SEQ ID NO: 6700 - DNA, 20 bp, Homo Sapiens
gcctgcaggggatggaacct

SEQ ID NO: 6701 - DNA, 20 bp, Homo Sapiens
cctgcaggggatggaacctt

SEQ ID NO: 6702 - DNA, 20 bp, Homo Sapiens
ctgcaggggatggaaccttc

SEQ ID NO: 6703 - DNA, 20 bp, Homo Sapiens
tgcaggggatggaaccttcc

SEQ ID NO: 6704 - DNA, 20 bp, Homo Sapiens
gcaggggatggaaccttcca

SEQ ID NO: 6705 - DNA, 20 bp, Homo Sapiens
caggggatggaaccttccag

SEQ ID NO: 6706 - DNA, 20 bp, Homo Sapiens
ggaaccttccagaagtgggc

SEQ ID NO: 6707 - DNA, 20 bp, Homo Sapiens
gaaccttccagaagtgggcg

SEQ ID NO: 6708 - DNA, 20 bp, Homo Sapiens
aaccttccagaagtgggcgg

SEQ ID NO: 6709 - DNA, 20 bp, Homo Sapiens
accttccagaagtgggcggc

SEQ ID NO: 6710 - DNA, 20 bp, Homo Sapiens
ccttccagaagtgggcggct

SEQ ID NO: 6711 - DNA, 20 bp, Homo Sapiens
cttccagaagtgggcggctg

SEQ ID NO: 6712 - DNA, 20 bp, Homo Sapiens
ttccagaagtgggcggctgt

SEQ ID NO: 6713 - DNA, 20 bp, Homo Sapiens
tccagaagtgggcggctgtg

SEQ ID NO: 6714 - DNA, 20 bp, Homo Sapiens
ccagaagtgggcggctgtgg

SEQ ID NO: 6715 - DNA, 20 bp, Homo Sapiens
cagaagtgggcggctgtggt

SEQ ID NO: 6716 - DNA, 20 bp, Homo Sapiens
agaagtgggcggctgtggtg

SEQ ID NO: 6717 - DNA, 20 bp, Homo Sapiens
gaagtgggcggctgtggtgg

SEQ ID NO: 6718 - DNA, 20 bp, Homo Sapiens
aagtgggcggctgtggtggt

SEQ ID NO: 6719 - DNA, 20 bp, Homo Sapiens
agtgggcggctgtggtggtg

SEQ ID NO: 6720 - DNA, 20 bp, Homo Sapiens
gtgggcggctgtggtggtgc

SEQ ID NO: 6721 - DNA, 20 bp, Homo Sapiens
tgggcggctgtggtggtgcc

SEQ ID NO: 6722 - DNA, 20 bp, Homo Sapiens
gggcggctgtggtggtgcct

SEQ ID NO: 6723 - DNA, 20 bp, Homo Sapiens
ggcggctgtggtggtgcctt

SEQ ID NO: 6724 - DNA, 20 bp, Homo Sapiens
gcggctgtggtggtgccttc

SEQ ID NO: 6725 - DNA, 20 bp, Homo Sapiens
cggctgtggtggtgccttct

SEQ ID NO: 6726 - DNA, 20 bp, Homo Sapiens
ggctgtggtggtgccttctg

SEQ ID NO: 6727 - DNA, 20 bp, Homo Sapiens
ctgtggtggtgccttctgga

SEQ ID NO: 6728 - DNA, 20 bp, Homo Sapiens
tgtggtggtgccttctggac

SEQ ID NO: 6729 - DNA, 20 bp, Homo Sapiens
gtggtggtgccttctggaca

SEQ ID NO: 6730 - DNA, 20 bp, Homo Sapiens
tggtggtgccttctggacag

SEQ ID NO: 6731 - DNA, 20 bp, Homo Sapiens
ggtggtgccttctggacagg

SEQ ID NO: 6732 - DNA, 20 bp, Homo Sapiens
gtggtgccttctggacagga

SEQ ID NO: 6733 - DNA, 20 bp, Homo Sapiens
tggtgccttctggacaggag

SEQ ID NO: 6734 - DNA, 20 bp, Homo Sapiens
ggtgccttctggacaggagc

SEQ ID NO: 6735 - DNA, 20 bp, Homo Sapiens
gtgccttctggacaggagca

SEQ ID NO: 6736 - DNA, 20 bp, Homo Sapiens
tgccttctggacaggagcag

SEQ ID NO: 6737 - DNA, 20 bp, Homo Sapiens
gccttctggacaggagcaga

SEQ ID NO: 6738 - DNA, 20 bp, Homo Sapiens
ccttctggacaggagcagag

SEQ ID NO: 6739 - DNA, 20 bp, Homo Sapiens
ggagcagagatacacctgcc

SEQ ID NO: 6740 - DNA, 20 bp, Homo Sapiens
cacctgccatgtgcagcatg

SEQ ID NO: 6741 - DNA, 20 bp, Homo Sapiens
cctgccatgtgcagcatgag

SEQ ID NO: 6742 - DNA, 20 bp, Homo Sapiens
ctgccatgtgcagcatgagg

SEQ ID NO: 6743 - DNA, 20 bp, Homo Sapiens
tgccatgtgcagcatgaggg

SEQ ID NO: 6744 - DNA, 20 bp, Homo Sapiens
gccatgtgcagcatgagggt

SEQ ID NO: 6745 - DNA, 20 bp, Homo Sapiens
gtgcagcatgagggtttgcc

SEQ ID NO: 6746 - DNA, 20 bp, Homo Sapiens
tgcagcatgagggtttgccc

SEQ ID NO: 6747 - DNA, 20 bp, Homo Sapiens
gcagcatgagggtttgccca

SEQ ID NO: 6748 - DNA, 20 bp, Homo Sapiens
gcatgagggtttgcccaagc

SEQ ID NO: 6749 - DNA, 20 bp, Homo Sapiens
catgagggtttgcccaagcc

SEQ ID NO: 6750 - DNA, 20 bp, Homo Sapiens
atgagggtttgcccaagccc

SEQ ID NO: 6751 - DNA, 20 bp, Homo Sapiens
tgagggtttgcccaagcccc

SEQ ID NO: 6752 - DNA, 20 bp, Homo Sapiens
gagggtttgcccaagcccct

SEQ ID NO: 6753 - DNA, 20 bp, Homo Sapiens
agggtttgcccaagcccctc

SEQ ID NO: 6754 - DNA, 20 bp, Homo Sapiens
gggtttgcccaagcccctca

SEQ ID NO: 6755 - DNA, 20 bp, Homo Sapiens
ggtttgcccaagcccctcac

SEQ ID NO: 6756 - DNA, 20 bp, Homo Sapiens
gtttgcccaagcccctcacc

SEQ ID NO: 6757 - DNA, 20 bp, Homo Sapiens
tttgcccaagcccctcaccc

SEQ ID NO: 6758 - DNA, 20 bp, Homo Sapiens
ttgcccaagcccctcaccct

SEQ ID NO: 6759 - DNA, 20 bp, Homo Sapiens
tgcccaagcccctcaccctg

SEQ ID NO: 6760 - DNA, 20 bp, Homo Sapiens
gcccaagcccctcaccctga

SEQ ID NO: 6761 - DNA, 20 bp, Homo Sapiens
cccaagcccctcaccctgag

SEQ ID NO: 6762 - DNA, 20 bp, Homo Sapiens
ccaagcccctcaccctgaga

SEQ ID NO: 6763 - DNA, 20 bp, Homo Sapiens
caagcccctcaccctgagat

SEQ ID NO: 6764 - DNA, 20 bp, Homo Sapiens
aagcccctcaccctgagatg

SEQ ID NO: 6765 - DNA, 20 bp, Homo Sapiens
agcccctcaccctgagatgg

SEQ ID NO: 6766 - DNA, 20 bp, Homo Sapiens
gcccctcaccctgagatggg

SEQ ID NO: 6767 - DNA, 20 bp, Homo Sapiens
cccctcaccctgagatggga

SEQ ID NO: 6768 - DNA, 20 bp, Homo Sapiens
ccctcaccctgagatgggag

SEQ ID NO: 6769 - DNA, 20 bp, Homo Sapiens
cctcaccctgagatgggagc

SEQ ID NO: 6770 - DNA, 20 bp, Homo Sapiens
ctcaccctgagatgggagcc

SEQ ID NO: 6771 - DNA, 20 bp, Homo Sapiens
tcaccctgagatgggagccg

SEQ ID NO: 6772 - DNA, 20 bp, Homo Sapiens
caccctgagatgggagccgt

SEQ ID NO: 6773 - DNA, 20 bp, Homo Sapiens
accctgagatgggagccgtc

SEQ ID NO: 6774 - DNA, 20 bp, Homo Sapiens
ccctgagatgggagccgtct

SEQ ID NO: 6775 - DNA, 20 bp, Homo Sapiens
cctgagatgggagccgtctt

SEQ ID NO: 6776 - DNA, 20 bp, Homo Sapiens
ctgagatgggagccgtcttc

SEQ ID NO: 6777 - DNA, 20 bp, Homo Sapiens
tgagatgggagccgtcttcc

SEQ ID NO: 6778 - DNA, 20 bp, Homo Sapiens
gagatgggagccgtcttccc

SEQ ID NO: 6779 - DNA, 20 bp, Homo Sapiens
agatgggagccgtcttccca

SEQ ID NO: 6780 - DNA, 20 bp, Homo Sapiens
gatgggagccgtcttcccag

SEQ ID NO: 6781 - DNA, 20 bp, Homo Sapiens
atgggagccgtcttcccagc

SEQ ID NO: 6782 - DNA, 20 bp, Homo Sapiens
tgggagccgtcttcccagcc

SEQ ID NO: 6783 - DNA, 20 bp, Homo Sapiens
gggagccgtcttcccagccc

SEQ ID NO: 6784 - DNA, 20 bp, Homo Sapiens
ggagccgtcttcccagccca

SEQ ID NO: 6785 - DNA, 20 bp, Homo Sapiens
gagccgtcttcccagcccac

SEQ ID NO: 6786 - DNA, 20 bp, Homo Sapiens
agccgtcttcccagcccacc

SEQ ID NO: 6787 - DNA, 20 bp, Homo Sapiens
gccgtcttcccagcccacca

SEQ ID NO: 6788 - DNA, 20 bp, Homo Sapiens
ccgtcttcccagcccaccat

SEQ ID NO: 6789 - DNA, 20 bp, Homo Sapiens
cgtcttcccagcccaccatc

SEQ ID NO: 6790 - DNA, 20 bp, Homo Sapiens
gtcttcccagcccaccatcc

SEQ ID NO: 6791 - DNA, 20 bp, Homo Sapiens
tcttcccagcccaccatccc

SEQ ID NO: 6792 - DNA, 20 bp, Homo Sapiens
cttcccagcccaccatcccc

SEQ ID NO: 6793 - DNA, 20 bp, Homo Sapiens
ttcccagcccaccatcccca

SEQ ID NO: 6794 - DNA, 20 bp, Homo Sapiens
tcccagcccaccatccccat

SEQ ID NO: 6795 - DNA, 20 bp, Homo Sapiens
cccagcccaccatccccatc

SEQ ID NO: 6796 - DNA, 20 bp, Homo Sapiens
ccagcccaccatccccatcg

SEQ ID NO: 6797 - DNA, 20 bp, Homo Sapiens
cagcccaccatccccatcgt

SEQ ID NO: 6798 - DNA, 20 bp, Homo Sapiens
agcccaccatccccatcgtg

SEQ ID NO: 6799 - DNA, 20 bp, Homo Sapiens
gcccaccatccccatcgtgg

SEQ ID NO: 6800 - DNA, 20 bp, Homo Sapiens
cccaccatccccatcgtggg

SEQ ID NO: 6801 - DNA, 20 bp, Homo Sapiens
ccaccatccccatcgtgggc

SEQ ID NO: 6802 - DNA, 20 bp, Homo Sapiens
caccatccccatcgtgggca

SEQ ID NO: 6803 - DNA, 20 bp, Homo Sapiens
accatccccatcgtgggcat

SEQ ID NO: 6804 - DNA, 20 bp, Homo Sapiens
ccatccccatcgtgggcatc

SEQ ID NO: 6805 - DNA, 20 bp, Homo Sapiens
catccccatcgtgggcatca

SEQ ID NO: 6806 - DNA, 20 bp, Homo Sapiens
ccccatcgtgggcatcattg

SEQ ID NO: 6807 - DNA, 20 bp, Homo Sapiens
cccatcgtgggcatcattgc

SEQ ID NO: 6808 - DNA, 20 bp, Homo Sapiens
tcgtgggcatcattgctggc

SEQ ID NO: 6809 - DNA, 20 bp, Homo Sapiens
cgtgggcatcattgctggcc

SEQ ID NO: 6810 - DNA, 20 bp, Homo Sapiens
gtgggcatcattgctggcct

SEQ ID NO: 6811 - DNA, 20 bp, Homo Sapiens
tgggcatcattgctggcctg

SEQ ID NO: 6812 - DNA, 20 bp, Homo Sapiens
gggcatcattgctggcctgg

SEQ ID NO: 6813 - DNA, 20 bp, Homo Sapiens
ggcatcattgctggcctggt

SEQ ID NO: 6814 - DNA, 20 bp, Homo Sapiens
gctggcctggttctctttgg

SEQ ID NO: 6815 - DNA, 20 bp, Homo Sapiens
ggcctggttctctttggagc

SEQ ID NO: 6816 - DNA, 20 bp, Homo Sapiens
ggagctgtgatcactggagc

SEQ ID NO: 6817 - DNA, 20 bp, Homo Sapiens
gatcactggagctgtggtcg

SEQ ID NO: 6818 - DNA, 20 bp, Homo Sapiens
atcactggagctgtggtcgc

SEQ ID NO: 6819 - DNA, 20 bp, Homo Sapiens
tcactggagctgtggtcgct

SEQ ID NO: 6820 - DNA, 20 bp, Homo Sapiens
cactggagctgtggtcgctg

SEQ ID NO: 6821 - DNA, 20 bp, Homo Sapiens
actggagctgtggtcgctgc

SEQ ID NO: 6822 - DNA, 20 bp, Homo Sapiens
ctggagctgtggtcgctgct

SEQ ID NO: 6823 - DNA, 20 bp, Homo Sapiens
tggagctgtggtcgctgctg

SEQ ID NO: 6824 - DNA, 20 bp, Homo Sapiens
ggagctgtggtcgctgctgt

SEQ ID NO: 6825 - DNA, 20 bp, Homo Sapiens
gagctgtggtcgctgctgtg

SEQ ID NO: 6826 - DNA, 20 bp, Homo Sapiens
agctgtggtcgctgctgtga

SEQ ID NO: 6827 - DNA, 20 bp, Homo Sapiens
gctgtggtcgctgctgtgat

SEQ ID NO: 6828 - DNA, 20 bp, Homo Sapiens
ctgtggtcgctgctgtgatg

SEQ ID NO: 6829 - DNA, 20 bp, Homo Sapiens
gtggtcgctgctgtgatgtg

SEQ ID NO: 6830 - DNA, 20 bp, Homo Sapiens
tggtcgctgctgtgatgtgg

SEQ ID NO: 6831 - DNA, 20 bp, Homo Sapiens
ggtcgctgctgtgatgtgga

SEQ ID NO: 6832 - DNA, 20 bp, Homo Sapiens
gtcgctgctgtgatgtggag

SEQ ID NO: 6833 - DNA, 20 bp, Homo Sapiens
tcgctgctgtgatgtggagg

SEQ ID NO: 6834 - DNA, 20 bp, Homo Sapiens
cgctgctgtgatgtggagga

SEQ ID NO: 6835 - DNA, 20 bp, Homo Sapiens
gctgctgtgatgtggaggag

SEQ ID NO: 6836 - DNA, 20 bp, Homo Sapiens
ctgctgtgatgtggaggagg

SEQ ID NO: 6837 - DNA, 20 bp, Homo Sapiens
gtggaggaggaagagctcag

SEQ ID NO: 6838 - DNA, 20 bp, Homo Sapiens
aggagggagctactctcagg

SEQ ID NO: 6839 - DNA, 20 bp, Homo Sapiens
ggagggagctactctcaggc

SEQ ID NO: 6840 - DNA, 20 bp, Homo Sapiens
gagggagctactctcaggct

SEQ ID NO: 6841 - DNA, 20 bp, Homo Sapiens
agggagctactctcaggctg

SEQ ID NO: 6842 - DNA, 20 bp, Homo Sapiens
gggagctactctcaggctgc

SEQ ID NO: 6843 - DNA, 20 bp, Homo Sapiens
ggagctactctcaggctgca

SEQ ID NO: 6844 - DNA, 20 bp, Homo Sapiens
gctactctcaggctgcaagc

SEQ ID NO: 6845 - DNA, 20 bp, Homo Sapiens
ctctcaggctgcaagcagtg

SEQ ID NO: 6846 - DNA, 20 bp, Homo Sapiens
ctcaggctgcaagcagtgac

SEQ ID NO: 6847 - DNA, 20 bp, Homo Sapiens
caggctgcaagcagtgacag

SEQ ID NO: 6848 - DNA, 20 bp, Homo Sapiens
ggctgcaagcagtgacagtg

SEQ ID NO: 6849 - DNA, 20 bp, Homo Sapiens
gctgcaagcagtgacagtgc

SEQ ID NO: 6850 - DNA, 20 bp, Homo Sapiens
ctgcaagcagtgacagtgcc

SEQ ID NO: 6851 - DNA, 20 bp, Homo Sapiens
tgcaagcagtgacagtgccc

SEQ ID NO: 6852 - DNA, 20 bp, Homo Sapiens
gcaagcagtgacagtgccca

SEQ ID NO: 6853 - DNA, 20 bp, Homo Sapiens
caagcagtgacagtgcccag

SEQ ID NO: 6854 - DNA, 20 bp, Homo Sapiens
aagcagtgacagtgcccagg

SEQ ID NO: 6855 - DNA, 20 bp, Homo Sapiens
agcagtgacagtgcccaggg

SEQ ID NO: 6856 - DNA, 20 bp, Homo Sapiens
gcagtgacagtgcccagggc

SEQ ID NO: 6857 - DNA, 20 bp, Homo Sapiens
cagtgacagtgcccagggct

SEQ ID NO: 6858 - DNA, 20 bp, Homo Sapiens
agtgacagtgcccagggctc

SEQ ID NO: 6859 - DNA, 20 bp, Homo Sapiens
gtgacagtgcccagggctct

SEQ ID NO: 6860 - DNA, 20 bp, Homo Sapiens
tgacagtgcccagggctctg

SEQ ID NO: 6861 - DNA, 20 bp, Homo Sapiens
gacagtgcccagggctctga

SEQ ID NO: 6862 - DNA, 20 bp, Homo Sapiens
acagtgcccagggctctgat

SEQ ID NO: 6863 - DNA, 20 bp, Homo Sapiens
cagtgcccagggctctgatg

SEQ ID NO: 6864 - DNA, 20 bp, Homo Sapiens
agtgcccagggctctgatgt

SEQ ID NO: 6865 - DNA, 20 bp, Homo Sapiens
gtgcccagggctctgatgtg

SEQ ID NO: 6866 - DNA, 20 bp, Homo Sapiens
tgcccagggctctgatgtgt

SEQ ID NO: 6867 - DNA, 20 bp, Homo Sapiens
gcccagggctctgatgtgtc

SEQ ID NO: 6868 - DNA, 20 bp, Homo Sapiens
cccagggctctgatgtgtct

SEQ ID NO: 6869 - DNA, 20 bp, Homo Sapiens
ccagggctctgatgtgtctc

SEQ ID NO: 6870 - DNA, 20 bp, Homo Sapiens
gagacagctgccttgtgtgg

SEQ ID NO: 6871 - DNA, 20 bp, Homo Sapiens
agacagctgccttgtgtggg

SEQ ID NO: 6872 - DNA, 20 bp, Homo Sapiens
gacagctgccttgtgtggga

SEQ ID NO: 6873 - DNA, 20 bp, Homo Sapiens
acagctgccttgtgtgggac

SEQ ID NO: 6874 - DNA, 20 bp, Homo Sapiens
cagctgccttgtgtgggact

SEQ ID NO: 6875 - DNA, 20 bp, Homo Sapiens
agctgccttgtgtgggactg

SEQ ID NO: 6876 - DNA, 20 bp, Homo Sapiens
gctgccttgtgtgggactga

SEQ ID NO: 6877 - DNA, 20 bp, Homo Sapiens
ctgccttgtgtgggactgag

SEQ ID NO: 6878 - DNA, 20 bp, Homo Sapiens
gccttgtgtgggactgagag

SEQ ID NO: 6879 - DNA, 20 bp, Homo Sapiens
ccttgtgtgggactgagagg

SEQ ID NO: 6880 - DNA, 20 bp, Homo Sapiens
cttgtgtgggactgagaggc

SEQ ID NO: 6881 - DNA, 20 bp, Homo Sapiens
gtgtgggactgagaggcaag

SEQ ID NO: 6882 - DNA, 20 bp, Homo Sapiens
gtgggactgagaggcaagag

SEQ ID NO: 6883 - DNA, 20 bp, Homo Sapiens
ggcaagagttgttcctgccc

SEQ ID NO: 6884 - DNA, 20 bp, Homo Sapiens
gagttgttcctgcccttccc

SEQ ID NO: 6885 - DNA, 20 bp, Homo Sapiens
cctgcccttccctttgtgac

SEQ ID NO: 6886 - DNA, 20 bp, Homo Sapiens
ggcacctgcatgtgtctgtg

SEQ ID NO: 6887 - DNA, 20 bp, Homo Sapiens
atgtgaggaggtggggagac

SEQ ID NO: 6888 - DNA, 20 bp, Homo Sapiens
tgtgaggaggtggggagacc

SEQ ID NO: 6889 - DNA, 20 bp, Homo Sapiens
gtgaggaggtggggagacca

SEQ ID NO: 6890 - DNA, 20 bp, Homo Sapiens
tgaggaggtggggagaccac

SEQ ID NO: 6891 - DNA, 20 bp, Homo Sapiens
gaggaggtggggagaccacc

SEQ ID NO: 6892 - DNA, 20 bp, Homo Sapiens
aggaggtggggagaccaccc

SEQ ID NO: 6893 - DNA, 20 bp, Homo Sapiens
ggaggtggggagaccacccc

SEQ ID NO: 6894 - DNA, 20 bp, Homo Sapiens
gaggtggggagaccacccca

SEQ ID NO: 6895 - DNA, 20 bp, Homo Sapiens
aggtggggagaccaccccac

SEQ ID NO: 6896 - DNA, 20 bp, Homo Sapiens
ggtggggagaccaccccacc

SEQ ID NO: 6897 - DNA, 20 bp, Homo Sapiens
gtggggagaccaccccaccc

SEQ ID NO: 6898 - DNA, 20 bp, Homo Sapiens
tggggagaccaccccacccc

SEQ ID NO: 6899 - DNA, 20 bp, Homo Sapiens
ggggagaccaccccaccccc

SEQ ID NO: 6900 - DNA, 20 bp, Homo Sapiens
gggagaccaccccaccccca

SEQ ID NO: 6901 - DNA, 20 bp, Homo Sapiens
ggagaccaccccacccccat

SEQ ID NO: 6902 - DNA, 20 bp, Homo Sapiens
gagaccaccccacccccatg

SEQ ID NO: 6903 - DNA, 20 bp, Homo Sapiens
agaccaccccacccccatgt

SEQ ID NO: 6904 - DNA, 20 bp, Homo Sapiens
gaccaccccacccccatgtc

SEQ ID NO: 6905 - DNA, 20 bp, Homo Sapiens
accaccccacccccatgtcc

SEQ ID NO: 6906 - DNA, 20 bp, Homo Sapiens
ccaccccacccccatgtcca

SEQ ID NO: 6907 - DNA, 20 bp, Homo Sapiens
caccccacccccatgtccac

SEQ ID NO: 6908 - DNA, 20 bp, Homo Sapiens
accccacccccatgtccacc

SEQ ID NO: 6909 - DNA, 20 bp, Homo Sapiens
ccccacccccatgtccacca

SEQ ID NO: 6910 - DNA, 20 bp, Homo Sapiens
cccacccccatgtccaccat

SEQ ID NO: 6911 - DNA, 20 bp, Homo Sapiens
ccacccccatgtccaccatg

SEQ ID NO: 6912 - DNA, 20 bp, Homo Sapiens
cacccccatgtccaccatga

SEQ ID NO: 6913 - DNA, 20 bp, Homo Sapiens
acccccatgtccaccatgac

SEQ ID NO: 6914 - DNA, 20 bp, Homo Sapiens
cccccatgtccaccatgacc

SEQ ID NO: 6915 - DNA, 20 bp, Homo Sapiens
ccccatgtccaccatgaccc

SEQ ID NO: 6916 - DNA, 20 bp, Homo Sapiens
cccatgtccaccatgaccct

SEQ ID NO: 6917 - DNA, 20 bp, Homo Sapiens
ccatgtccaccatgaccctc

SEQ ID NO: 6918 - DNA, 20 bp, Homo Sapiens
gtccaccatgaccctcttcc

SEQ ID NO: 6919 - DNA, 20 bp, Homo Sapiens
tccaccatgaccctcttccc

SEQ ID NO: 6920 - DNA, 20 bp, Homo Sapiens
ccaccatgaccctcttccca

SEQ ID NO: 6921 - DNA, 20 bp, Homo Sapiens
caccatgaccctcttcccac

SEQ ID NO: 6922 - DNA, 20 bp, Homo Sapiens
accatgaccctcttcccacg

SEQ ID NO: 6923 - DNA, 20 bp, Homo Sapiens
ccatgaccctcttcccacgc

SEQ ID NO: 6924 - DNA, 20 bp, Homo Sapiens
catgaccctcttcccacgct

SEQ ID NO: 6925 - DNA, 20 bp, Homo Sapiens
atgaccctcttcccacgctg

SEQ ID NO: 6926 - DNA, 20 bp, Homo Sapiens
tgaccctcttcccacgctga

SEQ ID NO: 6927 - DNA, 20 bp, Homo Sapiens
gaccctcttcccacgctgac

SEQ ID NO: 6928 - DNA, 20 bp, Homo Sapiens
accctcttcccacgctgacc

SEQ ID NO: 6929 - DNA, 20 bp, Homo Sapiens
ccctcttcccacgctgacct

SEQ ID NO: 6930 - DNA, 20 bp, Homo Sapiens
cctcttcccacgctgacctg

SEQ ID NO: 6931 - DNA, 20 bp, Homo Sapiens
ctcttcccacgctgacctgt

SEQ ID NO: 6932 - DNA, 20 bp, Homo Sapiens
tcttcccacgctgacctgtg

SEQ ID NO: 6933 - DNA, 20 bp, Homo Sapiens
cttcccacgctgacctgtgc

SEQ ID NO: 6934 - DNA, 20 bp, Homo Sapiens
ttcccacgctgacctgtgct

SEQ ID NO: 6935 - DNA, 20 bp, Homo Sapiens
tcccacgctgacctgtgctc

SEQ ID NO: 6936 - DNA, 20 bp, Homo Sapiens
cccacgctgacctgtgctcc

SEQ ID NO: 6937 - DNA, 20 bp, Homo Sapiens
ccacgctgacctgtgctccc

SEQ ID NO: 6938 - DNA, 20 bp, Homo Sapiens
cacgctgacctgtgctccct

SEQ ID NO: 6939 - DNA, 20 bp, Homo Sapiens
acgctgacctgtgctccctc

SEQ ID NO: 6940 - DNA, 20 bp, Homo Sapiens
cgctgacctgtgctccctcc

SEQ ID NO: 6941 - DNA, 20 bp, Homo Sapiens
gctgacctgtgctccctccc

SEQ ID NO: 6942 - DNA, 20 bp, Homo Sapiens
ctgacctgtgctccctcccc

SEQ ID NO: 6943 - DNA, 20 bp, Homo Sapiens
tgacctgtgctccctcccca

SEQ ID NO: 6944 - DNA, 20 bp, Homo Sapiens
gacctgtgctccctccccaa

SEQ ID NO: 6945 - DNA, 20 bp, Homo Sapiens
acctgtgctccctccccaat

SEQ ID NO: 6946 - DNA, 20 bp, Homo Sapiens
cctgtgctccctccccaatc

SEQ ID NO: 6947 - DNA, 20 bp, Homo Sapiens
ctgtgctccctccccaatca

SEQ ID NO: 6948 - DNA, 20 bp, Homo Sapiens
gtgctccctccccaatcatc

SEQ ID NO: 6949 - DNA, 20 bp, Homo Sapiens
tcctgttccagagaggtggg

SEQ ID NO: 6950 - DNA, 20 bp, Homo Sapiens
cctgttccagagaggtgggg

SEQ ID NO: 6951 - DNA, 20 bp, Homo Sapiens
ctgttccagagaggtggggc

SEQ ID NO: 6952 - DNA, 20 bp, Homo Sapiens
tgttccagagaggtggggct

SEQ ID NO: 6953 - DNA, 20 bp, Homo Sapiens
gttccagagaggtggggctg

SEQ ID NO: 6954 - DNA, 20 bp, Homo Sapiens
ttccagagaggtggggctga

SEQ ID NO: 6955 - DNA, 20 bp, Homo Sapiens
tccagagaggtggggctgag

SEQ ID NO: 6956 - DNA, 20 bp, Homo Sapiens
ccagagaggtggggctgagg

SEQ ID NO: 6957 - DNA, 20 bp, Homo Sapiens
cagagaggtggggctgaggt

SEQ ID NO: 6958 - DNA, 20 bp, Homo Sapiens
agagaggtggggctgaggtg

SEQ ID NO: 6959 - DNA, 20 bp, Homo Sapiens
gagaggtggggctgaggtgt

SEQ ID NO: 6960 - DNA, 20 bp, Homo Sapiens
agaggtggggctgaggtgtc

SEQ ID NO: 6961 - DNA, 20 bp, Homo Sapiens
gaggtggggctgaggtgtct

SEQ ID NO: 6962 - DNA, 20 bp, Homo Sapiens
aggtggggctgaggtgtctc

SEQ ID NO: 6963 - DNA, 20 bp, Homo Sapiens
ggtggggctgaggtgtctcc

SEQ ID NO: 6964 - DNA, 20 bp, Homo Sapiens
gtggggctgaggtgtctcca

SEQ ID NO: 6965 - DNA, 20 bp, Homo Sapiens
tggggctgaggtgtctccat

SEQ ID NO: 6966 - DNA, 20 bp, Homo Sapiens
ggggctgaggtgtctccatc

SEQ ID NO: 6967 - DNA, 20 bp, Homo Sapiens
gggctgaggtgtctccatct

SEQ ID NO: 6968 - DNA, 20 bp, Homo Sapiens
ggctgaggtgtctccatctc

SEQ ID NO: 6969 - DNA, 21 bp, Homo Sapiens
cagaagcagaggggtcagggc

SEQ ID NO: 6970 - DNA, 21 bp, Homo Sapiens
agaagcagaggggtcagggcg

SEQ ID NO: 6971 - DNA, 21 bp, Homo Sapiens
gaagcagaggggtcagggcga

SEQ ID NO: 6972 - DNA, 21 bp, Homo Sapiens
aagcagaggggtcagggcgaa

SEQ ID NO: 6973 - DNA, 21 bp, Homo Sapiens
agcagaggggtcagggcgaag

SEQ ID NO: 6974 - DNA, 21 bp, Homo Sapiens
gcagaggggtcagggcgaagt

SEQ ID NO: 6975 - DNA, 21 bp, Homo Sapiens
cagaggggtcagggcgaagtc

SEQ ID NO: 6976 - DNA, 21 bp, Homo Sapiens
agaggggtcagggcgaagtcc

SEQ ID NO: 6977 - DNA, 21 bp, Homo Sapiens
gaggggtcagggcgaagtccc

SEQ ID NO: 6978 - DNA, 21 bp, Homo Sapiens
aggggtcagggcgaagtccca

SEQ ID NO: 6979 - DNA, 21 bp, Homo Sapiens
ggggtcagggcgaagtcccag

SEQ ID NO: 6980 - DNA, 21 bp, Homo Sapiens
gggtcagggcgaagtcccagg

SEQ ID NO: 6981 - DNA, 21 bp, Homo Sapiens
ggtcagggcgaagtcccaggg

SEQ ID NO: 6982 - DNA, 21 bp, Homo Sapiens
gtcagggcgaagtcccagggc

SEQ ID NO: 6983 - DNA, 21 bp, Homo Sapiens
tcagggcgaagtcccagggcc

SEQ ID NO: 6984 - DNA, 21 bp, Homo Sapiens
cagggcgaagtcccagggccc

SEQ ID NO: 6985 - DNA, 21 bp, Homo Sapiens
agggcgaagtcccagggcccc

SEQ ID NO: 6986 - DNA, 21 bp, Homo Sapiens
gggcgaagtcccagggcccca

SEQ ID NO: 6987 - DNA, 21 bp, Homo Sapiens
ggcgaagtcccagggccccag

SEQ ID NO: 6988 - DNA, 21 bp, Homo Sapiens
gcgaagtcccagggccccagg

SEQ ID NO: 6989 - DNA, 21 bp, Homo Sapiens
cgaagtcccagggccccaggc

SEQ ID NO: 6990 - DNA, 21 bp, Homo Sapiens
gaagtcccagggccccaggcg

SEQ ID NO: 6991 - DNA, 21 bp, Homo Sapiens
aagtcccagggccccaggcgt

SEQ ID NO: 6992 - DNA, 21 bp, Homo Sapiens
agtcccagggccccaggcgtg

SEQ ID NO: 6993 - DNA, 21 bp, Homo Sapiens
gtcccagggccccaggcgtgg

SEQ ID NO: 6994 - DNA, 21 bp, Homo Sapiens
tcccagggccccaggcgtggc

SEQ ID NO: 6995 - DNA, 21 bp, Homo Sapiens
cccagggccccaggcgtggct

SEQ ID NO: 6996 - DNA, 21 bp, Homo Sapiens
ccagggccccaggcgtggctc

SEQ ID NO: 6997 - DNA, 21 bp, Homo Sapiens
cagggccccaggcgtggctct

SEQ ID NO: 6998 - DNA, 21 bp, Homo Sapiens
agggccccaggcgtggctctc

SEQ ID NO: 6999 - DNA, 21 bp, Homo Sapiens
gggccccaggcgtggctctca

SEQ ID NO: 7000 - DNA, 21 bp, Homo Sapiens
ggccccaggcgtggctctcag

SEQ ID NO: 7001 - DNA, 21 bp, Homo Sapiens
gccccaggcgtggctctcagg

SEQ ID NO: 7002 - DNA, 21 bp, Homo Sapiens
ccccaggcgtggctctcaggg

SEQ ID NO: 7003 - DNA, 21 bp, Homo Sapiens
cccaggcgtggctctcagggt

SEQ ID NO: 7004 - DNA, 21 bp, Homo Sapiens
ccaggcgtggctctcagggtc

SEQ ID NO: 7005 - DNA, 21 bp, Homo Sapiens
caggcgtggctctcagggtct

SEQ ID NO: 7006 - DNA, 21 bp, Homo Sapiens
aggcgtggctctcagggtctc

SEQ ID NO: 7007 - DNA, 21 bp, Homo Sapiens
ggcgtggctctcagggtctca

SEQ ID NO: 7008 - DNA, 21 bp, Homo Sapiens
gcgtggctctcagggtctcag

SEQ ID NO: 7009 - DNA, 21 bp, Homo Sapiens
cgtggctctcagggtctcagg

SEQ ID NO: 7010 - DNA, 21 bp, Homo Sapiens
gtggctctcagggtctcaggc

SEQ ID NO: 7011 - DNA, 21 bp, Homo Sapiens
tggctctcagggtctcaggcc

SEQ ID NO: 7012 - DNA, 21 bp, Homo Sapiens
ggctctcagggtctcaggccc

SEQ ID NO: 7013 - DNA, 21 bp, Homo Sapiens
gctctcagggtctcaggcccc

SEQ ID NO: 7014 - DNA, 21 bp, Homo Sapiens
ctctcagggtctcaggccccg

SEQ ID NO: 7015 - DNA, 21 bp, Homo Sapiens
tctcagggtctcaggccccga

SEQ ID NO: 7016 - DNA, 21 bp, Homo Sapiens
ctcagggtctcaggccccgaa

SEQ ID NO: 7017 - DNA, 21 bp, Homo Sapiens
tcagggtctcaggccccgaag

SEQ ID NO: 7018 - DNA, 21 bp, Homo Sapiens
cagggtctcaggccccgaagg

SEQ ID NO: 7019 - DNA, 21 bp, Homo Sapiens
agggtctcaggccccgaaggc

SEQ ID NO: 7020 - DNA, 21 bp, Homo Sapiens
gggtctcaggccccgaaggcg

SEQ ID NO: 7021 - DNA, 21 bp, Homo Sapiens
ggtctcaggccccgaaggcgg

SEQ ID NO: 7022 - DNA, 21 bp, Homo Sapiens
gtctcaggccccgaaggcggt

SEQ ID NO: 7023 - DNA, 21 bp, Homo Sapiens
tctcaggccccgaaggcggtg

SEQ ID NO: 7024 - DNA, 21 bp, Homo Sapiens
ctcaggccccgaaggcggtgt

SEQ ID NO: 7025 - DNA, 21 bp, Homo Sapiens
tcaggccccgaaggcggtgta

SEQ ID NO: 7026 - DNA, 21 bp, Homo Sapiens
caggccccgaaggcggtgtat

SEQ ID NO: 7027 - DNA, 21 bp, Homo Sapiens
aggccccgaaggcggtgtatg

SEQ ID NO: 7028 - DNA, 21 bp, Homo Sapiens
ggccccgaaggcggtgtatgg

SEQ ID NO: 7029 - DNA, 21 bp, Homo Sapiens
gccccgaaggcggtgtatgga

SEQ ID NO: 7030 - DNA, 21 bp, Homo Sapiens
ccccgaaggcggtgtatggat

SEQ ID NO: 7031 - DNA, 21 bp, Homo Sapiens
ggcggtgtatggattggggag

SEQ ID NO: 7032 - DNA, 21 bp, Homo Sapiens
atggattggggagtcccagcc

SEQ ID NO: 7033 - DNA, 21 bp, Homo Sapiens
tggattggggagtcccagcct

SEQ ID NO: 7034 - DNA, 21 bp, Homo Sapiens
ggattggggagtcccagcctt

SEQ ID NO: 7035 - DNA, 21 bp, Homo Sapiens
gattggggagtcccagccttg

SEQ ID NO: 7036 - DNA, 21 bp, Homo Sapiens
attggggagtcccagccttgg

SEQ ID NO: 7037 - DNA, 21 bp, Homo Sapiens
ttggggagtcccagccttggg

SEQ ID NO: 7038 - DNA, 21 bp, Homo Sapiens
tggggagtcccagccttgggg

SEQ ID NO: 7039 - DNA, 21 bp, Homo Sapiens
ggggagtcccagccttgggga

SEQ ID NO: 7040 - DNA, 21 bp, Homo Sapiens
gggagtcccagccttggggat

SEQ ID NO: 7041 - DNA, 21 bp, Homo Sapiens
ggagtcccagccttggggatt

SEQ ID NO: 7042 - DNA, 21 bp, Homo Sapiens
gagtcccagccttggggattc

SEQ ID NO: 7043 - DNA, 21 bp, Homo Sapiens
agtcccagccttggggattcc

SEQ ID NO: 7044 - DNA, 21 bp, Homo Sapiens
gtcccagccttggggattccc

SEQ ID NO: 7045 - DNA, 21 bp, Homo Sapiens
tcccagccttggggattcccc

SEQ ID NO: 7046 - DNA, 21 bp, Homo Sapiens
cccagccttggggattcccca

SEQ ID NO: 7047 - DNA, 21 bp, Homo Sapiens
ccagccttggggattccccaa

SEQ ID NO: 7048 - DNA, 21 bp, Homo Sapiens
cagccttggggattccccaac

SEQ ID NO: 7049 - DNA, 21 bp, Homo Sapiens
gccttggggattccccaactc

SEQ ID NO: 7050 - DNA, 21 bp, Homo Sapiens
ccttggggattccccaactcc

SEQ ID NO: 7051 - DNA, 21 bp, Homo Sapiens
cttggggattccccaactccg

SEQ ID NO: 7052 - DNA, 21 bp, Homo Sapiens
ttggggattccccaactccgc

SEQ ID NO: 7053 - DNA, 21 bp, Homo Sapiens
tggggattccccaactccgca

SEQ ID NO: 7054 - DNA, 21 bp, Homo Sapiens
ggggattccccaactccgcag

SEQ ID NO: 7055 - DNA, 21 bp, Homo Sapiens
gggattccccaactccgcagt

SEQ ID NO: 7056 - DNA, 21 bp, Homo Sapiens
tcctggatactcacgacgcgg

SEQ ID NO: 7057 - DNA, 21 bp, Homo Sapiens
cctggatactcacgacgcgga

SEQ ID NO: 7058 - DNA, 21 bp, Homo Sapiens
ctggatactcacgacgcggac

SEQ ID NO: 7059 - DNA, 21 bp, Homo Sapiens
tggatactcacgacgcggacc

SEQ ID NO: 7060 - DNA, 21 bp, Homo Sapiens
ggatactcacgacgcggaccc

SEQ ID NO: 7061 - DNA, 21 bp, Homo Sapiens
gatactcacgacgcggaccca

SEQ ID NO: 7062 - DNA, 21 bp, Homo Sapiens
atactcacgacgcggacccag

SEQ ID NO: 7063 - DNA, 21 bp, Homo Sapiens
tactcacgacgcggacccagt

SEQ ID NO: 7064 - DNA, 21 bp, Homo Sapiens
actcacgacgcggacccagtt

SEQ ID NO: 7065 - DNA, 21 bp, Homo Sapiens
ctcacgacgcggacccagttc

SEQ ID NO: 7066 - DNA, 21 bp, Homo Sapiens
tcacgacgcggacccagttct

SEQ ID NO: 7067 - DNA, 21 bp, Homo Sapiens
cacgacgcggacccagttctc

SEQ ID NO: 7068 - DNA, 21 bp, Homo Sapiens
acgacgcggacccagttctca

SEQ ID NO: 7069 - DNA, 21 bp, Homo Sapiens
cgacgcggacccagttctcac

SEQ ID NO: 7070 - DNA, 21 bp, Homo Sapiens
gacgcggacccagttctcact

SEQ ID NO: 7071 - DNA, 21 bp, Homo Sapiens
acgcggacccagttctcactc

SEQ ID NO: 7072 - DNA, 21 bp, Homo Sapiens
cgcggacccagttctcactcc

SEQ ID NO: 7073 - DNA, 21 bp, Homo Sapiens
gcggacccagttctcactccc

SEQ ID NO: 7074 - DNA, 21 bp, Homo Sapiens
cggacccagttctcactccca

SEQ ID NO: 7075 - DNA, 21 bp, Homo Sapiens
ctcactcccattgggtgtcgg

SEQ ID NO: 7076 - DNA, 21 bp, Homo Sapiens
tcactcccattgggtgtcggg

SEQ ID NO: 7077 - DNA, 21 bp, Homo Sapiens
cactcccattgggtgtcgggt

SEQ ID NO: 7078 - DNA, 21 bp, Homo Sapiens
cccattgggtgtcgggtttcc

SEQ ID NO: 7079 - DNA, 21 bp, Homo Sapiens
agccaatcagtgtcgtcgcgg

SEQ ID NO: 7080 - DNA, 21 bp, Homo Sapiens
gccaatcagtgtcgtcgcggt

SEQ ID NO: 7081 - DNA, 21 bp, Homo Sapiens
ccaatcagtgtcgtcgcggtc

SEQ ID NO: 7082 - DNA, 21 bp, Homo Sapiens
caatcagtgtcgtcgcggtcg

SEQ ID NO: 7083 - DNA, 21 bp, Homo Sapiens
aatcagtgtcgtcgcggtcgc

SEQ ID NO: 7084 - DNA, 21 bp, Homo Sapiens
atcagtgtcgtcgcggtcgcg

SEQ ID NO: 7085 - DNA, 21 bp, Homo Sapiens
tcagtgtcgtcgcggtcgcgg

SEQ ID NO: 7086 - DNA, 21 bp, Homo Sapiens
cagtgtcgtcgcggtcgcggt

SEQ ID NO: 7087 - DNA, 21 bp, Homo Sapiens
agtgtcgtcgcggtcgcggtt

SEQ ID NO: 7088 - DNA, 21 bp, Homo Sapiens
gtgtcgtcgcggtcgcggttc

SEQ ID NO: 7089 - DNA, 21 bp, Homo Sapiens
tgtcgtcgcggtcgcggttct

SEQ ID NO: 7090 - DNA, 21 bp, Homo Sapiens
gtcgtcgcggtcgcggttcta

SEQ ID NO: 7091 - DNA, 21 bp, Homo Sapiens
tcgtcgcggtcgcggttctaa

SEQ ID NO: 7092 - DNA, 21 bp, Homo Sapiens
cgtcgcggtcgcggttctaaa

SEQ ID NO: 7093 - DNA, 21 bp, Homo Sapiens
gtcgcggtcgcggttctaaag

SEQ ID NO: 7094 - DNA, 21 bp, Homo Sapiens
cgcggtcgcggttctaaagtc

SEQ ID NO: 7095 - DNA, 21 bp, Homo Sapiens
gcggtcgcggttctaaagtcc

SEQ ID NO: 7096 - DNA, 21 bp, Homo Sapiens
cggtcgcggttctaaagtccg

SEQ ID NO: 7097 - DNA, 21 bp, Homo Sapiens
ggtcgcggttctaaagtccgc

SEQ ID NO: 7098 - DNA, 21 bp, Homo Sapiens
cgcggttctaaagtccgcacg

SEQ ID NO: 7099 - DNA, 21 bp, Homo Sapiens
gcggttctaaagtccgcacgc

SEQ ID NO: 7100 - DNA, 21 bp, Homo Sapiens
ctaaagtccgcacgcacccac

SEQ ID NO: 7101 - DNA, 21 bp, Homo Sapiens
taaagtccgcacgcacccacc

SEQ ID NO: 7102 - DNA, 21 bp, Homo Sapiens
aaagtccgcacgcacccaccg

SEQ ID NO: 7103 - DNA, 21 bp, Homo Sapiens
aagtccgcacgcacccaccgg

SEQ ID NO: 7104 - DNA, 21 bp, Homo Sapiens
agtccgcacgcacccaccggg

SEQ ID NO: 7105 - DNA, 21 bp, Homo Sapiens
gtccgcacgcacccaccggga

SEQ ID NO: 7106 - DNA, 21 bp, Homo Sapiens
tccgcacgcacccaccgggac

SEQ ID NO: 7107 - DNA, 21 bp, Homo Sapiens
ccgcacgcacccaccgggact

SEQ ID NO: 7108 - DNA, 21 bp, Homo Sapiens
cgcacgcacccaccgggactc

SEQ ID NO: 7109 - DNA, 21 bp, Homo Sapiens
gcacgcacccaccgggactca

SEQ ID NO: 7110 - DNA, 21 bp, Homo Sapiens
cacgcacccaccgggactcag

SEQ ID NO: 7111 - DNA, 21 bp, Homo Sapiens
acgcacccaccgggactcaga

SEQ ID NO: 7112 - DNA, 21 bp, Homo Sapiens
cgcacccaccgggactcagat

SEQ ID NO: 7113 - DNA, 21 bp, Homo Sapiens
gcacccaccgggactcagatt

SEQ ID NO: 7114 - DNA, 21 bp, Homo Sapiens
cacccaccgggactcagattc

SEQ ID NO: 7115 - DNA, 21 bp, Homo Sapiens
cccaccgggactcagattctc

SEQ ID NO: 7116 - DNA, 21 bp, Homo Sapiens
ccaccgggactcagattctcc

SEQ ID NO: 7117 - DNA, 21 bp, Homo Sapiens
caccgggactcagattctccc

SEQ ID NO: 7118 - DNA, 21 bp, Homo Sapiens
accgggactcagattctcccc

SEQ ID NO: 7119 - DNA, 21 bp, Homo Sapiens
ccgggactcagattctcccca

SEQ ID NO: 7120 - DNA, 21 bp, Homo Sapiens
cgggactcagattctccccag

SEQ ID NO: 7121 - DNA, 21 bp, Homo Sapiens
ctcagattctccccagacgcc

SEQ ID NO: 7122 - DNA, 21 bp, Homo Sapiens
tcagattctccccagacgccg

SEQ ID NO: 7123 - DNA, 21 bp, Homo Sapiens
cagattctccccagacgccga

SEQ ID NO: 7124 - DNA, 21 bp, Homo Sapiens
agattctccccagacgccgag

SEQ ID NO: 7125 - DNA, 21 bp, Homo Sapiens
gattctccccagacgccgagg

SEQ ID NO: 7126 - DNA, 21 bp, Homo Sapiens
attctccccagacgccgagga

SEQ ID NO: 7127 - DNA, 21 bp, Homo Sapiens
ttctccccagacgccgaggat

SEQ ID NO: 7128 - DNA, 21 bp, Homo Sapiens
tctccccagacgccgaggatg

SEQ ID NO: 7129 - DNA, 21 bp, Homo Sapiens
ctccccagacgccgaggatgg

SEQ ID NO: 7130 - DNA, 21 bp, Homo Sapiens
tccccagacgccgaggatggc

SEQ ID NO: 7131 - DNA, 21 bp, Homo Sapiens
ccccagacgccgaggatggcc

SEQ ID NO: 7132 - DNA, 21 bp, Homo Sapiens
cccagacgccgaggatggccg

SEQ ID NO: 7133 - DNA, 21 bp, Homo Sapiens
ccagacgccgaggatggccgt

SEQ ID NO: 7134 - DNA, 21 bp, Homo Sapiens
cagacgccgaggatggccgtc

SEQ ID NO: 7135 - DNA, 21 bp, Homo Sapiens
agacgccgaggatggccgtca

SEQ ID NO: 7136 - DNA, 21 bp, Homo Sapiens
gacgccgaggatggccgtcat

SEQ ID NO: 7137 - DNA, 21 bp, Homo Sapiens
acgccgaggatggccgtcatg

SEQ ID NO: 7138 - DNA, 21 bp, Homo Sapiens
cgccgaggatggccgtcatgg

SEQ ID NO: 7139 - DNA, 21 bp, Homo Sapiens
gccgaggatggccgtcatggc

SEQ ID NO: 7140 - DNA, 21 bp, Homo Sapiens
ccgaggatggccgtcatggcg

SEQ ID NO: 7141 - DNA, 21 bp, Homo Sapiens
cgaggatggccgtcatggcgc

SEQ ID NO: 7142 - DNA, 21 bp, Homo Sapiens
gaggatggccgtcatggcgcc

SEQ ID NO: 7143 - DNA, 21 bp, Homo Sapiens
aggatggccgtcatggcgccc

SEQ ID NO: 7144 - DNA, 21 bp, Homo Sapiens
ggatggccgtcatggcgcccc

SEQ ID NO: 7145 - DNA, 21 bp, Homo Sapiens
gatggccgtcatggcgccccg

SEQ ID NO: 7146 - DNA, 21 bp, Homo Sapiens
atggccgtcatggcgccccga

SEQ ID NO: 7147 - DNA, 21 bp, Homo Sapiens
tggccgtcatggcgccccgaa

SEQ ID NO: 7148 - DNA, 21 bp, Homo Sapiens
ggccgtcatggcgccccgaac

SEQ ID NO: 7149 - DNA, 21 bp, Homo Sapiens
gccgtcatggcgccccgaacc

SEQ ID NO: 7150 - DNA, 21 bp, Homo Sapiens
ccgtcatggcgccccgaaccc

SEQ ID NO: 7151 - DNA, 21 bp, Homo Sapiens
cgtcatggcgccccgaaccct

SEQ ID NO: 7152 - DNA, 21 bp, Homo Sapiens
gtcatggcgccccgaaccctc

SEQ ID NO: 7153 - DNA, 21 bp, Homo Sapiens
tcatggcgccccgaaccctcg

SEQ ID NO: 7154 - DNA, 21 bp, Homo Sapiens
catggcgccccgaaccctcgt

SEQ ID NO: 7155 - DNA, 21 bp, Homo Sapiens
atggcgccccgaaccctcgtc

SEQ ID NO: 7156 - DNA, 21 bp, Homo Sapiens
tggcgccccgaaccctcgtcc

SEQ ID NO: 7157 - DNA, 21 bp, Homo Sapiens
ggcgccccgaaccctcgtcct

SEQ ID NO: 7158 - DNA, 21 bp, Homo Sapiens
gcgccccgaaccctcgtcctg

SEQ ID NO: 7159 - DNA, 21 bp, Homo Sapiens
cgccccgaaccctcgtcctgc

SEQ ID NO: 7160 - DNA, 21 bp, Homo Sapiens
gccccgaaccctcgtcctgct

SEQ ID NO: 7161 - DNA, 21 bp, Homo Sapiens
ccccgaaccctcgtcctgcta

SEQ ID NO: 7162 - DNA, 21 bp, Homo Sapiens
cccgaaccctcgtcctgctac

SEQ ID NO: 7163 - DNA, 21 bp, Homo Sapiens
ccgaaccctcgtcctgctact

SEQ ID NO: 7164 - DNA, 21 bp, Homo Sapiens
cgaaccctcgtcctgctactc

SEQ ID NO: 7165 - DNA, 21 bp, Homo Sapiens
accctcgtcctgctactctcg

SEQ ID NO: 7166 - DNA, 21 bp, Homo Sapiens
ccctcgtcctgctactctcgg

SEQ ID NO: 7167 - DNA, 21 bp, Homo Sapiens
cctcgtcctgctactctcggg

SEQ ID NO: 7168 - DNA, 21 bp, Homo Sapiens
ctcgtcctgctactctcgggg

SEQ ID NO: 7169 - DNA, 21 bp, Homo Sapiens
tcgtcctgctactctcggggg

SEQ ID NO: 7170 - DNA, 21 bp, Homo Sapiens
cgtcctgctactctcgggggc

SEQ ID NO: 7171 - DNA, 21 bp, Homo Sapiens
gtcctgctactctcgggggct

SEQ ID NO: 7172 - DNA, 21 bp, Homo Sapiens
tcctgctactctcgggggctc

SEQ ID NO: 7173 - DNA, 21 bp, Homo Sapiens
cctgctactctcgggggctct

SEQ ID NO: 7174 - DNA, 21 bp, Homo Sapiens
ctgctactctcgggggctctg

SEQ ID NO: 7175 - DNA, 21 bp, Homo Sapiens
tgctactctcgggggctctgg

SEQ ID NO: 7176 - DNA, 21 bp, Homo Sapiens
gctactctcgggggctctggc

SEQ ID NO: 7177 - DNA, 21 bp, Homo Sapiens
ctactctcgggggctctggcc

SEQ ID NO: 7178 - DNA, 21 bp, Homo Sapiens
tactctcgggggctctggccc

SEQ ID NO: 7179 - DNA, 21 bp, Homo Sapiens
actctcgggggctctggccct

SEQ ID NO: 7180 - DNA, 21 bp, Homo Sapiens
ctctcgggggctctggccctg

SEQ ID NO: 7181 - DNA, 21 bp, Homo Sapiens
tctcgggggctctggccctga

SEQ ID NO: 7182 - DNA, 21 bp, Homo Sapiens
ctcgggggctctggccctgac

SEQ ID NO: 7183 - DNA, 21 bp, Homo Sapiens
tcgggggctctggccctgacc

SEQ ID NO: 7184 - DNA, 21 bp, Homo Sapiens
cgggggctctggccctgaccc

SEQ ID NO: 7185 - DNA, 21 bp, Homo Sapiens
gggggctctggccctgaccca

SEQ ID NO: 7186 - DNA, 21 bp, Homo Sapiens
ggggctctggccctgacccag

SEQ ID NO: 7187 - DNA, 21 bp, Homo Sapiens
gggctctggccctgacccaga

SEQ ID NO: 7188 - DNA, 21 bp, Homo Sapiens
ggctctggccctgacccagac

SEQ ID NO: 7189 - DNA, 21 bp, Homo Sapiens
gctctggccctgacccagacc

SEQ ID NO: 7190 - DNA, 21 bp, Homo Sapiens
ctctggccctgacccagacct

SEQ ID NO: 7191 - DNA, 21 bp, Homo Sapiens
tctggccctgacccagacctg

SEQ ID NO: 7192 - DNA, 21 bp, Homo Sapiens
ctggccctgacccagacctgg

SEQ ID NO: 7193 - DNA, 21 bp, Homo Sapiens
tggccctgacccagacctggg

SEQ ID NO: 7194 - DNA, 21 bp, Homo Sapiens
ggccctgacccagacctgggc

SEQ ID NO: 7195 - DNA, 21 bp, Homo Sapiens
gccctgacccagacctgggcg

SEQ ID NO: 7196 - DNA, 21 bp, Homo Sapiens
ccctgacccagacctgggcgg

SEQ ID NO: 7197 - DNA, 21 bp, Homo Sapiens
cctgacccagacctgggcggg

SEQ ID NO: 7198 - DNA, 21 bp, Homo Sapiens
ctgacccagacctgggcgggc

SEQ ID NO: 7199 - DNA, 21 bp, Homo Sapiens
tgacccagacctgggcgggct

SEQ ID NO: 7200 - DNA, 21 bp, Homo Sapiens
gacccagacctgggcgggctc

SEQ ID NO: 7201 - DNA, 21 bp, Homo Sapiens
acccagacctgggcgggctct

SEQ ID NO: 7202 - DNA, 21 bp, Homo Sapiens
cccagacctgggcgggctctc

SEQ ID NO: 7203 - DNA, 21 bp, Homo Sapiens
ccagacctgggcgggctctca

SEQ ID NO: 7204 - DNA, 21 bp, Homo Sapiens
cagacctgggcgggctctcac

SEQ ID NO: 7205 - DNA, 21 bp, Homo Sapiens
agacctgggcgggctctcact

SEQ ID NO: 7206 - DNA, 21 bp, Homo Sapiens
gacctgggcgggctctcactc

SEQ ID NO: 7207 - DNA, 21 bp, Homo Sapiens
acctgggcgggctctcactcc

SEQ ID NO: 7208 - DNA, 21 bp, Homo Sapiens
cctgggcgggctctcactcca

SEQ ID NO: 7209 - DNA, 21 bp, Homo Sapiens
ctgggcgggctctcactccat

SEQ ID NO: 7210 - DNA, 21 bp, Homo Sapiens
tgggcgggctctcactccatg

SEQ ID NO: 7211 - DNA, 21 bp, Homo Sapiens
gggcgggctctcactccatga

SEQ ID NO: 7212 - DNA, 21 bp, Homo Sapiens
ggcgggctctcactccatgag

SEQ ID NO: 7213 - DNA, 21 bp, Homo Sapiens
gcgggctctcactccatgagg

SEQ ID NO: 7214 - DNA, 21 bp, Homo Sapiens
cgggctctcactccatgaggt

SEQ ID NO: 7215 - DNA, 21 bp, Homo Sapiens
tcttcacatccgtgtcccggc

SEQ ID NO: 7216 - DNA, 21 bp, Homo Sapiens
cttcacatccgtgtcccggcc

SEQ ID NO: 7217 - DNA, 21 bp, Homo Sapiens
ttcacatccgtgtcccggccc

SEQ ID NO: 7218 - DNA, 21 bp, Homo Sapiens
tcacatccgtgtcccggcccg

SEQ ID NO: 7219 - DNA, 21 bp, Homo Sapiens
cacatccgtgtcccggcccgg

SEQ ID NO: 7220 - DNA, 21 bp, Homo Sapiens
acatccgtgtcccggcccggc

SEQ ID NO: 7221 - DNA, 21 bp, Homo Sapiens
catccgtgtcccggcccggcc

SEQ ID NO: 7222 - DNA, 21 bp, Homo Sapiens
atccgtgtcccggcccggccg

SEQ ID NO: 7223 - DNA, 21 bp, Homo Sapiens
tccgtgtcccggcccggccgc

SEQ ID NO: 7224 - DNA, 21 bp, Homo Sapiens
ccgtgtcccggcccggccgcg

SEQ ID NO: 7225 - DNA, 21 bp, Homo Sapiens
cgtgtcccggcccggccgcgg

SEQ ID NO: 7226 - DNA, 21 bp, Homo Sapiens
gtgtcccggcccggccgcggg

SEQ ID NO: 7227 - DNA, 21 bp, Homo Sapiens
tgtcccggcccggccgcgggg

SEQ ID NO: 7228 - DNA, 21 bp, Homo Sapiens
gtcccggcccggccgcgggga

SEQ ID NO: 7229 - DNA, 21 bp, Homo Sapiens
tcccggcccggccgcggggag

SEQ ID NO: 7230 - DNA, 21 bp, Homo Sapiens
cccggcccggccgcggggagc

SEQ ID NO: 7231 - DNA, 21 bp, Homo Sapiens
ccggcccggccgcggggagcc

SEQ ID NO: 7232 - DNA, 21 bp, Homo Sapiens
cggcccggccgcggggagccc

SEQ ID NO: 7233 - DNA, 21 bp, Homo Sapiens
ggcccggccgcggggagcccc

SEQ ID NO: 7234 - DNA, 21 bp, Homo Sapiens
gcccggccgcggggagccccg

SEQ ID NO: 7235 - DNA, 21 bp, Homo Sapiens
cccggccgcggggagccccgc

SEQ ID NO: 7236 - DNA, 21 bp, Homo Sapiens
ccggccgcggggagccccgct

SEQ ID NO: 7237 - DNA, 21 bp, Homo Sapiens
cggccgcggggagccccgctt

SEQ ID NO: 7238 - DNA, 21 bp, Homo Sapiens
ggccgcggggagccccgcttc

SEQ ID NO: 7239 - DNA, 21 bp, Homo Sapiens
gccgcggggagccccgcttca

SEQ ID NO: 7240 - DNA, 21 bp, Homo Sapiens
ccgcggggagccccgcttcat

SEQ ID NO: 7241 - DNA, 21 bp, Homo Sapiens
cgcggggagccccgcttcatc

SEQ ID NO: 7242 - DNA, 21 bp, Homo Sapiens
gcggggagccccgcttcatcg

SEQ ID NO: 7243 - DNA, 21 bp, Homo Sapiens
cggggagccccgcttcatcgc

SEQ ID NO: 7244 - DNA, 21 bp, Homo Sapiens
ggggagccccgcttcatcgca

SEQ ID NO: 7245 - DNA, 21 bp, Homo Sapiens
gggagccccgcttcatcgcag

SEQ ID NO: 7246 - DNA, 21 bp, Homo Sapiens
ggagccccgcttcatcgcagt

SEQ ID NO: 7247 - DNA, 21 bp, Homo Sapiens
gagccccgcttcatcgcagtg

SEQ ID NO: 7248 - DNA, 21 bp, Homo Sapiens
agccccgcttcatcgcagtgg

SEQ ID NO: 7249 - DNA, 21 bp, Homo Sapiens
gccccgcttcatcgcagtggg

SEQ ID NO: 7250 - DNA, 21 bp, Homo Sapiens
ccccgcttcatcgcagtgggc

SEQ ID NO: 7251 - DNA, 21 bp, Homo Sapiens
cccgcttcatcgcagtgggct

SEQ ID NO: 7252 - DNA, 21 bp, Homo Sapiens
ccgcttcatcgcagtgggcta

SEQ ID NO: 7253 - DNA, 21 bp, Homo Sapiens
cgcttcatcgcagtgggctac

SEQ ID NO: 7254 - DNA, 21 bp, Homo Sapiens
gcttcatcgcagtgggctacg

SEQ ID NO: 7255 - DNA, 21 bp, Homo Sapiens
tcatcgcagtgggctacgtgg

SEQ ID NO: 7256 - DNA, 21 bp, Homo Sapiens
catcgcagtgggctacgtgga

SEQ ID NO: 7257 - DNA, 21 bp, Homo Sapiens
atcgcagtgggctacgtggac

SEQ ID NO: 7258 - DNA, 21 bp, Homo Sapiens
tcgcagtgggctacgtggacg

SEQ ID NO: 7259 - DNA, 21 bp, Homo Sapiens
cgcagtgggctacgtggacga

SEQ ID NO: 7260 - DNA, 21 bp, Homo Sapiens
gcagtgggctacgtggacgac

SEQ ID NO: 7261 - DNA, 21 bp, Homo Sapiens
cagtgggctacgtggacgaca

SEQ ID NO: 7262 - DNA, 21 bp, Homo Sapiens
agtgggctacgtggacgacac

SEQ ID NO: 7263 - DNA, 21 bp, Homo Sapiens
gtgggctacgtggacgacacg

SEQ ID NO: 7264 - DNA, 21 bp, Homo Sapiens
tgggctacgtggacgacacgc

SEQ ID NO: 7265 - DNA, 21 bp, Homo Sapiens
gggctacgtggacgacacgca

SEQ ID NO: 7266 - DNA, 21 bp, Homo Sapiens
ggctacgtggacgacacgcag

SEQ ID NO: 7267 - DNA, 21 bp, Homo Sapiens
gctacgtggacgacacgcagt

SEQ ID NO: 7268 - DNA, 21 bp, Homo Sapiens
acgtggacgacacgcagttcg

SEQ ID NO: 7269 - DNA, 21 bp, Homo Sapiens
cgtggacgacacgcagttcgt

SEQ ID NO: 7270 - DNA, 21 bp, Homo Sapiens
gtggacgacacgcagttcgtg

SEQ ID NO: 7271 - DNA, 21 bp, Homo Sapiens
tggacgacacgcagttcgtgc

SEQ ID NO: 7272 - DNA, 21 bp, Homo Sapiens
ggacgacacgcagttcgtgcg

SEQ ID NO: 7273 - DNA, 21 bp, Homo Sapiens
gacgacacgcagttcgtgcgg

SEQ ID NO: 7274 - DNA, 21 bp, Homo Sapiens
acgacacgcagttcgtgcggt

SEQ ID NO: 7275 - DNA, 21 bp, Homo Sapiens
cgacacgcagttcgtgcggtt

SEQ ID NO: 7276 - DNA, 21 bp, Homo Sapiens
gacacgcagttcgtgcggttc

SEQ ID NO: 7277 - DNA, 21 bp, Homo Sapiens
acacgcagttcgtgcggttcg

SEQ ID NO: 7278 - DNA, 21 bp, Homo Sapiens
cacgcagttcgtgcggttcga

SEQ ID NO: 7279 - DNA, 21 bp, Homo Sapiens
acgcagttcgtgcggttcgac

SEQ ID NO: 7280 - DNA, 21 bp, Homo Sapiens
cgcagttcgtgcggttcgaca

SEQ ID NO: 7281 - DNA, 21 bp, Homo Sapiens
gcagttcgtgcggttcgacag

SEQ ID NO: 7282 - DNA, 21 bp, Homo Sapiens
cagttcgtgcggttcgacagc

SEQ ID NO: 7283 - DNA, 21 bp, Homo Sapiens
agttcgtgcggttcgacagcg

SEQ ID NO: 7284 - DNA, 21 bp, Homo Sapiens
gttcgtgcggttcgacagcga

SEQ ID NO: 7285 - DNA, 21 bp, Homo Sapiens
ttcgtgcggttcgacagcgac

SEQ ID NO: 7286 - DNA, 21 bp, Homo Sapiens
tcgtgcggttcgacagcgacg

SEQ ID NO: 7287 - DNA, 21 bp, Homo Sapiens
cgtgcggttcgacagcgacgc

SEQ ID NO: 7288 - DNA, 21 bp, Homo Sapiens
gtgcggttcgacagcgacgcc

SEQ ID NO: 7289 - DNA, 21 bp, Homo Sapiens
tgcggttcgacagcgacgccg

SEQ ID NO: 7290 - DNA, 21 bp, Homo Sapiens
gcggttcgacagcgacgccgc

SEQ ID NO: 7291 - DNA, 21 bp, Homo Sapiens
cggttcgacagcgacgccgcg

SEQ ID NO: 7292 - DNA, 21 bp, Homo Sapiens
ggttcgacagcgacgccgcga

SEQ ID NO: 7293 - DNA, 21 bp, Homo Sapiens
gttcgacagcgacgccgcgag

SEQ ID NO: 7294 - DNA, 21 bp, Homo Sapiens
ttcgacagcgacgccgcgagc

SEQ ID NO: 7295 - DNA, 21 bp, Homo Sapiens
tcgacagcgacgccgcgagcc

SEQ ID NO: 7296 - DNA, 21 bp, Homo Sapiens
cgacagcgacgccgcgagcca

SEQ ID NO: 7297 - DNA, 21 bp, Homo Sapiens
gacagcgacgccgcgagccag

SEQ ID NO: 7298 - DNA, 21 bp, Homo Sapiens
acagcgacgccgcgagccaga

SEQ ID NO: 7299 - DNA, 21 bp, Homo Sapiens
cagcgacgccgcgagccagag

SEQ ID NO: 7300 - DNA, 21 bp, Homo Sapiens
agcgacgccgcgagccagagg

SEQ ID NO: 7301 - DNA, 21 bp, Homo Sapiens
gcgacgccgcgagccagagga

SEQ ID NO: 7302 - DNA, 21 bp, Homo Sapiens
cgacgccgcgagccagaggat

SEQ ID NO: 7303 - DNA, 21 bp, Homo Sapiens
gacgccgcgagccagaggatg

SEQ ID NO: 7304 - DNA, 21 bp, Homo Sapiens
acgccgcgagccagaggatgg

SEQ ID NO: 7305 - DNA, 21 bp, Homo Sapiens
cgccgcgagccagaggatgga

SEQ ID NO: 7306 - DNA, 21 bp, Homo Sapiens
gccgcgagccagaggatggag

SEQ ID NO: 7307 - DNA, 21 bp, Homo Sapiens
ccgcgagccagaggatggagc

SEQ ID NO: 7308 - DNA, 21 bp, Homo Sapiens
cgcgagccagaggatggagcc

SEQ ID NO: 7309 - DNA, 21 bp, Homo Sapiens
gcgagccagaggatggagccg

SEQ ID NO: 7310 - DNA, 21 bp, Homo Sapiens
cgagccagaggatggagccgc

SEQ ID NO: 7311 - DNA, 21 bp, Homo Sapiens
gagccagaggatggagccgcg

SEQ ID NO: 7312 - DNA, 21 bp, Homo Sapiens
agccagaggatggagccgcgg

SEQ ID NO: 7313 - DNA, 21 bp, Homo Sapiens
gccagaggatggagccgcggg

SEQ ID NO: 7314 - DNA, 21 bp, Homo Sapiens
ccagaggatggagccgcgggc

SEQ ID NO: 7315 - DNA, 21 bp, Homo Sapiens
cagaggatggagccgcgggcg

SEQ ID NO: 7316 - DNA, 21 bp, Homo Sapiens
agaggatggagccgcgggcgc

SEQ ID NO: 7317 - DNA, 21 bp, Homo Sapiens
gaggatggagccgcgggcgcc

SEQ ID NO: 7318 - DNA, 21 bp, Homo Sapiens
aggatggagccgcgggcgccg

SEQ ID NO: 7319 - DNA, 21 bp, Homo Sapiens
ggatggagccgcgggcgccgt

SEQ ID NO: 7320 - DNA, 21 bp, Homo Sapiens
gatggagccgcgggcgccgtg

SEQ ID NO: 7321 - DNA, 21 bp, Homo Sapiens
atggagccgcgggcgccgtgg

SEQ ID NO: 7322 - DNA, 21 bp, Homo Sapiens
tggagccgcgggcgccgtgga

SEQ ID NO: 7323 - DNA, 21 bp, Homo Sapiens
ggagccgcgggcgccgtggat

SEQ ID NO: 7324 - DNA, 21 bp, Homo Sapiens
gagccgcgggcgccgtggata

SEQ ID NO: 7325 - DNA, 21 bp, Homo Sapiens
agccgcgggcgccgtggatag

SEQ ID NO: 7326 - DNA, 21 bp, Homo Sapiens
gccgcgggcgccgtggataga

SEQ ID NO: 7327 - DNA, 21 bp, Homo Sapiens
ccgcgggcgccgtggatagag

SEQ ID NO: 7328 - DNA, 21 bp, Homo Sapiens
cgcgggcgccgtggatagagc

SEQ ID NO: 7329 - DNA, 21 bp, Homo Sapiens
gcgggcgccgtggatagagca

SEQ ID NO: 7330 - DNA, 21 bp, Homo Sapiens
cgggcgccgtggatagagcag

SEQ ID NO: 7331 - DNA, 21 bp, Homo Sapiens
gggcgccgtggatagagcagg

SEQ ID NO: 7332 - DNA, 21 bp, Homo Sapiens
ggcgccgtggatagagcagga

SEQ ID NO: 7333 - DNA, 21 bp, Homo Sapiens
gcgccgtggatagagcaggag

SEQ ID NO: 7334 - DNA, 21 bp, Homo Sapiens
cgccgtggatagagcaggagg

SEQ ID NO: 7335 - DNA, 21 bp, Homo Sapiens
gccgtggatagagcaggaggg

SEQ ID NO: 7336 - DNA, 21 bp, Homo Sapiens
ccgtggatagagcaggagggt

SEQ ID NO: 7337 - DNA, 21 bp, Homo Sapiens
cgtggatagagcaggagggtc

SEQ ID NO: 7338 - DNA, 21 bp, Homo Sapiens
gtggatagagcaggagggtcc

SEQ ID NO: 7339 - DNA, 21 bp, Homo Sapiens
tggatagagcaggagggtccg

SEQ ID NO: 7340 - DNA, 21 bp, Homo Sapiens
ggatagagcaggagggtccgg

SEQ ID NO: 7341 - DNA, 21 bp, Homo Sapiens
gatagagcaggagggtccgga

SEQ ID NO: 7342 - DNA, 21 bp, Homo Sapiens
atagagcaggagggtccggag

SEQ ID NO: 7343 - DNA, 21 bp, Homo Sapiens
tagagcaggagggtccggagt

SEQ ID NO: 7344 - DNA, 21 bp, Homo Sapiens
agagcaggagggtccggagta

SEQ ID NO: 7345 - DNA, 21 bp, Homo Sapiens
gagcaggagggtccggagtat

SEQ ID NO: 7346 - DNA, 21 bp, Homo Sapiens
gcaggagggtccggagtattg

SEQ ID NO: 7347 - DNA, 21 bp, Homo Sapiens
caggagggtccggagtattgg

SEQ ID NO: 7348 - DNA, 21 bp, Homo Sapiens
aggagggtccggagtattggg

SEQ ID NO: 7349 - DNA, 21 bp, Homo Sapiens
ggagggtccggagtattggga

SEQ ID NO: 7350 - DNA, 21 bp, Homo Sapiens
gagggtccggagtattgggac

SEQ ID NO: 7351 - DNA, 21 bp, Homo Sapiens
agggtccggagtattgggacg

SEQ ID NO: 7352 - DNA, 21 bp, Homo Sapiens
gggtccggagtattgggacgg

SEQ ID NO: 7353 - DNA, 21 bp, Homo Sapiens
ggtccggagtattgggacggg

SEQ ID NO: 7354 - DNA, 21 bp, Homo Sapiens
gtccggagtattgggacgggg

SEQ ID NO: 7355 - DNA, 21 bp, Homo Sapiens
tccggagtattgggacgggga

SEQ ID NO: 7356 - DNA, 21 bp, Homo Sapiens
ccggagtattgggacggggag

SEQ ID NO: 7357 - DNA, 21 bp, Homo Sapiens
cggagtattgggacggggaga

SEQ ID NO: 7358 - DNA, 21 bp, Homo Sapiens
ggagtattgggacggggagac

SEQ ID NO: 7359 - DNA, 21 bp, Homo Sapiens
gtattgggacggggagacacg

SEQ ID NO: 7360 - DNA, 21 bp, Homo Sapiens
tattgggacggggagacacgg

SEQ ID NO: 7361 - DNA, 21 bp, Homo Sapiens
attgggacggggagacacgga

SEQ ID NO: 7362 - DNA, 21 bp, Homo Sapiens
ttgggacggggagacacggaa

SEQ ID NO: 7363 - DNA, 21 bp, Homo Sapiens
tgggacggggagacacggaaa

SEQ ID NO: 7364 - DNA, 21 bp, Homo Sapiens
gggacggggagacacggaaag

SEQ ID NO: 7365 - DNA, 21 bp, Homo Sapiens
ggacggggagacacggaaagt

SEQ ID NO: 7366 - DNA, 21 bp, Homo Sapiens
gacggggagacacggaaagtg

SEQ ID NO: 7367 - DNA, 21 bp, Homo Sapiens
aggcccactcacagactcacc

SEQ ID NO: 7368 - DNA, 21 bp, Homo Sapiens
ggcccactcacagactcaccg

SEQ ID NO: 7369 - DNA, 21 bp, Homo Sapiens
gcccactcacagactcaccga

SEQ ID NO: 7370 - DNA, 21 bp, Homo Sapiens
cccactcacagactcaccgag

SEQ ID NO: 7371 - DNA, 21 bp, Homo Sapiens
cacagactcaccgagtggacc

SEQ ID NO: 7372 - DNA, 21 bp, Homo Sapiens
cagactcaccgagtggacctg

SEQ ID NO: 7373 - DNA, 21 bp, Homo Sapiens
agactcaccgagtggacctgg

SEQ ID NO: 7374 - DNA, 21 bp, Homo Sapiens
gactcaccgagtggacctggg

SEQ ID NO: 7375 - DNA, 21 bp, Homo Sapiens
actcaccgagtggacctgggg

SEQ ID NO: 7376 - DNA, 21 bp, Homo Sapiens
ctcaccgagtggacctgggga

SEQ ID NO: 7377 - DNA, 21 bp, Homo Sapiens
tcaccgagtggacctggggac

SEQ ID NO: 7378 - DNA, 21 bp, Homo Sapiens
caccgagtggacctggggacc

SEQ ID NO: 7379 - DNA, 21 bp, Homo Sapiens
accgagtggacctggggaccc

SEQ ID NO: 7380 - DNA, 21 bp, Homo Sapiens
ccgagtggacctggggaccct

SEQ ID NO: 7381 - DNA, 21 bp, Homo Sapiens
cgagtggacctggggaccctg

SEQ ID NO: 7382 - DNA, 21 bp, Homo Sapiens
gagtggacctggggaccctgc

SEQ ID NO: 7383 - DNA, 21 bp, Homo Sapiens
agtggacctggggaccctgcg

SEQ ID NO: 7384 - DNA, 21 bp, Homo Sapiens
gtggacctggggaccctgcgc

SEQ ID NO: 7385 - DNA, 21 bp, Homo Sapiens
tggacctggggaccctgcgcg

SEQ ID NO: 7386 - DNA, 21 bp, Homo Sapiens
ggacctggggaccctgcgcgg

SEQ ID NO: 7387 - DNA, 21 bp, Homo Sapiens
gacctggggaccctgcgcggc

SEQ ID NO: 7388 - DNA, 21 bp, Homo Sapiens
acctggggaccctgcgcggct

SEQ ID NO: 7389 - DNA, 21 bp, Homo Sapiens
cctggggaccctgcgcggcta

SEQ ID NO: 7390 - DNA, 21 bp, Homo Sapiens
ctggggaccctgcgcggctac

SEQ ID NO: 7391 - DNA, 21 bp, Homo Sapiens
tggggaccctgcgcggctact

SEQ ID NO: 7392 - DNA, 21 bp, Homo Sapiens
ggggaccctgcgcggctacta

SEQ ID NO: 7393 - DNA, 21 bp, Homo Sapiens
gggaccctgcgcggctactac

SEQ ID NO: 7394 - DNA, 21 bp, Homo Sapiens
ggaccctgcgcggctactaca

SEQ ID NO: 7395 - DNA, 21 bp, Homo Sapiens
gaccctgcgcggctactacaa

SEQ ID NO: 7396 - DNA, 21 bp, Homo Sapiens
accctgcgcggctactacaac

SEQ ID NO: 7397 - DNA, 21 bp, Homo Sapiens
ccctgcgcggctactacaacc

SEQ ID NO: 7398 - DNA, 21 bp, Homo Sapiens
cctgcgcggctactacaacca

SEQ ID NO: 7399 - DNA, 21 bp, Homo Sapiens
ctgcgcggctactacaaccag

SEQ ID NO: 7400 - DNA, 21 bp, Homo Sapiens
gcgcggctactacaaccagag

SEQ ID NO: 7401 - DNA, 21 bp, Homo Sapiens
cgcggctactacaaccagagc

SEQ ID NO: 7402 - DNA, 21 bp, Homo Sapiens
gcggctactacaaccagagcg

SEQ ID NO: 7403 - DNA, 21 bp, Homo Sapiens
actacaaccagagcgaggccg

SEQ ID NO: 7404 - DNA, 21 bp, Homo Sapiens
ctacaaccagagcgaggccgg

SEQ ID NO: 7405 - DNA, 21 bp, Homo Sapiens
tacaaccagagcgaggccggt

SEQ ID NO: 7406 - DNA, 21 bp, Homo Sapiens
acaaccagagcgaggccggtt

SEQ ID NO: 7407 - DNA, 21 bp, Homo Sapiens
caaccagagcgaggccggttc

SEQ ID NO: 7408 - DNA, 21 bp, Homo Sapiens
aaccagagcgaggccggttct

SEQ ID NO: 7409 - DNA, 21 bp, Homo Sapiens
accagagcgaggccggttctc

SEQ ID NO: 7410 - DNA, 21 bp, Homo Sapiens
ccagagcgaggccggttctca

SEQ ID NO: 7411 - DNA, 21 bp, Homo Sapiens
cagagcgaggccggttctcac

SEQ ID NO: 7412 - DNA, 21 bp, Homo Sapiens
agagcgaggccggttctcaca

SEQ ID NO: 7413 - DNA, 21 bp, Homo Sapiens
gagcgaggccggttctcacac

SEQ ID NO: 7414 - DNA, 21 bp, Homo Sapiens
agcgaggccggttctcacacc

SEQ ID NO: 7415 - DNA, 21 bp, Homo Sapiens
gcgaggccggttctcacaccg

SEQ ID NO: 7416 - DNA, 21 bp, Homo Sapiens
cgaggccggttctcacaccgt

SEQ ID NO: 7417 - DNA, 21 bp, Homo Sapiens
gaggccggttctcacaccgtc

SEQ ID NO: 7418 - DNA, 21 bp, Homo Sapiens
aggccggttctcacaccgtcc

SEQ ID NO: 7419 - DNA, 21 bp, Homo Sapiens
ggccggttctcacaccgtcca

SEQ ID NO: 7420 - DNA, 21 bp, Homo Sapiens
gccggttctcacaccgtccag

SEQ ID NO: 7421 - DNA, 21 bp, Homo Sapiens
ccggttctcacaccgtccaga

SEQ ID NO: 7422 - DNA, 21 bp, Homo Sapiens
cggttctcacaccgtccagag

SEQ ID NO: 7423 - DNA, 21 bp, Homo Sapiens
ggttctcacaccgtccagagg

SEQ ID NO: 7424 - DNA, 21 bp, Homo Sapiens
ggatgtatggctgcgacgtgg

SEQ ID NO: 7425 - DNA, 21 bp, Homo Sapiens
gatgtatggctgcgacgtggg

SEQ ID NO: 7426 - DNA, 21 bp, Homo Sapiens
atgtatggctgcgacgtgggg

SEQ ID NO: 7427 - DNA, 21 bp, Homo Sapiens
tgtatggctgcgacgtggggt

SEQ ID NO: 7428 - DNA, 21 bp, Homo Sapiens
gtatggctgcgacgtggggtc

SEQ ID NO: 7429 - DNA, 21 bp, Homo Sapiens
tatggctgcgacgtggggtcg

SEQ ID NO: 7430 - DNA, 21 bp, Homo Sapiens
atggctgcgacgtggggtcgg

SEQ ID NO: 7431 - DNA, 21 bp, Homo Sapiens
tggctgcgacgtggggtcgga

SEQ ID NO: 7432 - DNA, 21 bp, Homo Sapiens
ggctgcgacgtggggtcggac

SEQ ID NO: 7433 - DNA, 21 bp, Homo Sapiens
gctgcgacgtggggtcggact

SEQ ID NO: 7434 - DNA, 21 bp, Homo Sapiens
ctgcgacgtggggtcggactg

SEQ ID NO: 7435 - DNA, 21 bp, Homo Sapiens
tgcgacgtggggtcggactgg

SEQ ID NO: 7436 - DNA, 21 bp, Homo Sapiens
gcgacgtggggtcggactggc

SEQ ID NO: 7437 - DNA, 21 bp, Homo Sapiens
cgacgtggggtcggactggcg

SEQ ID NO: 7438 - DNA, 21 bp, Homo Sapiens
gacgtggggtcggactggcgc

SEQ ID NO: 7439 - DNA, 21 bp, Homo Sapiens
acgtggggtcggactggcgct

SEQ ID NO: 7440 - DNA, 21 bp, Homo Sapiens
cgtggggtcggactggcgctt

SEQ ID NO: 7441 - DNA, 21 bp, Homo Sapiens
gtggggtcggactggcgcttc

SEQ ID NO: 7442 - DNA, 21 bp, Homo Sapiens
tggggtcggactggcgcttcc

SEQ ID NO: 7443 - DNA, 21 bp, Homo Sapiens
ggggtcggactggcgcttcct

SEQ ID NO: 7444 - DNA, 21 bp, Homo Sapiens
gggtcggactggcgcttcctc

SEQ ID NO: 7445 - DNA, 21 bp, Homo Sapiens
ggtcggactggcgcttcctcc

SEQ ID NO: 7446 - DNA, 21 bp, Homo Sapiens
gtcggactggcgcttcctccg

SEQ ID NO: 7447 - DNA, 21 bp, Homo Sapiens
tcggactggcgcttcctccgc

SEQ ID NO: 7448 - DNA, 21 bp, Homo Sapiens
cggactggcgcttcctccgcg

SEQ ID NO: 7449 - DNA, 21 bp, Homo Sapiens
ggactggcgcttcctccgcgg

SEQ ID NO: 7450 - DNA, 21 bp, Homo Sapiens
gactggcgcttcctccgcggg

SEQ ID NO: 7451 - DNA, 21 bp, Homo Sapiens
actggcgcttcctccgcgggt

SEQ ID NO: 7452 - DNA, 21 bp, Homo Sapiens
ctggcgcttcctccgcgggta

SEQ ID NO: 7453 - DNA, 21 bp, Homo Sapiens
tggcgcttcctccgcgggtac

SEQ ID NO: 7454 - DNA, 21 bp, Homo Sapiens
ggcgcttcctccgcgggtacc

SEQ ID NO: 7455 - DNA, 21 bp, Homo Sapiens
gcgcttcctccgcgggtacca

SEQ ID NO: 7456 - DNA, 21 bp, Homo Sapiens
cgcttcctccgcgggtaccac

SEQ ID NO: 7457 - DNA, 21 bp, Homo Sapiens
gcttcctccgcgggtaccacc

SEQ ID NO: 7458 - DNA, 21 bp, Homo Sapiens
cttcctccgcgggtaccacca

SEQ ID NO: 7459 - DNA, 21 bp, Homo Sapiens
ttcctccgcgggtaccaccag

SEQ ID NO: 7460 - DNA, 21 bp, Homo Sapiens
tcctccgcgggtaccaccagt

SEQ ID NO: 7461 - DNA, 21 bp, Homo Sapiens
cctccgcgggtaccaccagta

SEQ ID NO: 7462 - DNA, 21 bp, Homo Sapiens
ctccgcgggtaccaccagtac

SEQ ID NO: 7463 - DNA, 21 bp, Homo Sapiens
tccgcgggtaccaccagtacg

SEQ ID NO: 7464 - DNA, 21 bp, Homo Sapiens
ccgcgggtaccaccagtacgc

SEQ ID NO: 7465 - DNA, 21 bp, Homo Sapiens
cgcgggtaccaccagtacgcc

SEQ ID NO: 7466 - DNA, 21 bp, Homo Sapiens
gcgggtaccaccagtacgcct

SEQ ID NO: 7467 - DNA, 21 bp, Homo Sapiens
cgggtaccaccagtacgccta

SEQ ID NO: 7468 - DNA, 21 bp, Homo Sapiens
gggtaccaccagtacgcctac

SEQ ID NO: 7469 - DNA, 21 bp, Homo Sapiens
ggtaccaccagtacgcctacg

SEQ ID NO: 7470 - DNA, 21 bp, Homo Sapiens
accaccagtacgcctacgacg

SEQ ID NO: 7471 - DNA, 21 bp, Homo Sapiens
ccaccagtacgcctacgacgg

SEQ ID NO: 7472 - DNA, 21 bp, Homo Sapiens
caccagtacgcctacgacggc

SEQ ID NO: 7473 - DNA, 21 bp, Homo Sapiens
accagtacgcctacgacggca

SEQ ID NO: 7474 - DNA, 21 bp, Homo Sapiens
ccagtacgcctacgacggcaa

SEQ ID NO: 7475 - DNA, 21 bp, Homo Sapiens
cagtacgcctacgacggcaag

SEQ ID NO: 7476 - DNA, 21 bp, Homo Sapiens
agtacgcctacgacggcaagg

SEQ ID NO: 7477 - DNA, 21 bp, Homo Sapiens
gtacgcctacgacggcaagga

SEQ ID NO: 7478 - DNA, 21 bp, Homo Sapiens
tcgccctgaaagaggacctgc

SEQ ID NO: 7479 - DNA, 21 bp, Homo Sapiens
cgccctgaaagaggacctgcg

SEQ ID NO: 7480 - DNA, 21 bp, Homo Sapiens
gccctgaaagaggacctgcgc

SEQ ID NO: 7481 - DNA, 21 bp, Homo Sapiens
ccctgaaagaggacctgcgct

SEQ ID NO: 7482 - DNA, 21 bp, Homo Sapiens
cctgaaagaggacctgcgctc

SEQ ID NO: 7483 - DNA, 21 bp, Homo Sapiens
agaggacctgcgctcttggac

SEQ ID NO: 7484 - DNA, 21 bp, Homo Sapiens
gaggacctgcgctcttggacc

SEQ ID NO: 7485 - DNA, 21 bp, Homo Sapiens
aggacctgcgctcttggaccg

SEQ ID NO: 7486 - DNA, 21 bp, Homo Sapiens
ggacctgcgctcttggaccgc

SEQ ID NO: 7487 - DNA, 21 bp, Homo Sapiens
gacctgcgctcttggaccgcg

SEQ ID NO: 7488 - DNA, 21 bp, Homo Sapiens
acctgcgctcttggaccgcgg

SEQ ID NO: 7489 - DNA, 21 bp, Homo Sapiens
cctgcgctcttggaccgcggc

SEQ ID NO: 7490 - DNA, 21 bp, Homo Sapiens
ctgcgctcttggaccgcggcg

SEQ ID NO: 7491 - DNA, 21 bp, Homo Sapiens
tgcgctcttggaccgcggcgg

SEQ ID NO: 7492 - DNA, 21 bp, Homo Sapiens
gcgctcttggaccgcggcgga

SEQ ID NO: 7493 - DNA, 21 bp, Homo Sapiens
cgctcttggaccgcggcggac

SEQ ID NO: 7494 - DNA, 21 bp, Homo Sapiens
gctcttggaccgcggcggaca

SEQ ID NO: 7495 - DNA, 21 bp, Homo Sapiens
ctcttggaccgcggcggacat

SEQ ID NO: 7496 - DNA, 21 bp, Homo Sapiens
tcttggaccgcggcggacatg

SEQ ID NO: 7497 - DNA, 21 bp, Homo Sapiens
cttggaccgcggcggacatgg

SEQ ID NO: 7498 - DNA, 21 bp, Homo Sapiens
ttggaccgcggcggacatggc

SEQ ID NO: 7499 - DNA, 21 bp, Homo Sapiens
tggaccgcggcggacatggca

SEQ ID NO: 7500 - DNA, 21 bp, Homo Sapiens
ggaccgcggcggacatggcag

SEQ ID NO: 7501 - DNA, 21 bp, Homo Sapiens
gaccgcggcggacatggcagc

SEQ ID NO: 7502 - DNA, 21 bp, Homo Sapiens
accgcggcggacatggcagct

SEQ ID NO: 7503 - DNA, 21 bp, Homo Sapiens
ccgcggcggacatggcagctc

SEQ ID NO: 7504 - DNA, 21 bp, Homo Sapiens
cgcggcggacatggcagctca

SEQ ID NO: 7505 - DNA, 21 bp, Homo Sapiens
gcggcggacatggcagctcag

SEQ ID NO: 7506 - DNA, 21 bp, Homo Sapiens
cggcggacatggcagctcaga

SEQ ID NO: 7507 - DNA, 21 bp, Homo Sapiens
ggcggacatggcagctcagac

SEQ ID NO: 7508 - DNA, 21 bp, Homo Sapiens
gcggacatggcagctcagacc

SEQ ID NO: 7509 - DNA, 21 bp, Homo Sapiens
cggacatggcagctcagacca

SEQ ID NO: 7510 - DNA, 21 bp, Homo Sapiens
ggacatggcagctcagaccac

SEQ ID NO: 7511 - DNA, 21 bp, Homo Sapiens
gacatggcagctcagaccacc

SEQ ID NO: 7512 - DNA, 21 bp, Homo Sapiens
tggcagctcagaccaccaagc

SEQ ID NO: 7513 - DNA, 21 bp, Homo Sapiens
ggcagctcagaccaccaagca

SEQ ID NO: 7514 - DNA, 21 bp, Homo Sapiens
gcagctcagaccaccaagcac

SEQ ID NO: 7515 - DNA, 21 bp, Homo Sapiens
ccaccaagcacaagtgggagg

SEQ ID NO: 7516 - DNA, 21 bp, Homo Sapiens
caccaagcacaagtgggaggc

SEQ ID NO: 7517 - DNA, 21 bp, Homo Sapiens
accaagcacaagtgggaggcg

SEQ ID NO: 7518 - DNA, 21 bp, Homo Sapiens
ccaagcacaagtgggaggcgg

SEQ ID NO: 7519 - DNA, 21 bp, Homo Sapiens
caagcacaagtgggaggcggc

SEQ ID NO: 7520 - DNA, 21 bp, Homo Sapiens
aagcacaagtgggaggcggcc

SEQ ID NO: 7521 - DNA, 21 bp, Homo Sapiens
agcacaagtgggaggcggccc

SEQ ID NO: 7522 - DNA, 21 bp, Homo Sapiens
gcacaagtgggaggcggccca

SEQ ID NO: 7523 - DNA, 21 bp, Homo Sapiens
cacaagtgggaggcggcccat

SEQ ID NO: 7524 - DNA, 21 bp, Homo Sapiens
acaagtgggaggcggcccatg

SEQ ID NO: 7525 - DNA, 21 bp, Homo Sapiens
caagtgggaggcggcccatgt

SEQ ID NO: 7526 - DNA, 21 bp, Homo Sapiens
aagtgggaggcggcccatgtg

SEQ ID NO: 7527 - DNA, 21 bp, Homo Sapiens
agtgggaggcggcccatgtgg

SEQ ID NO: 7528 - DNA, 21 bp, Homo Sapiens
gtgggaggcggcccatgtggc

SEQ ID NO: 7529 - DNA, 21 bp, Homo Sapiens
tgggaggcggcccatgtggcg

SEQ ID NO: 7530 - DNA, 21 bp, Homo Sapiens
gggaggcggcccatgtggcgg

SEQ ID NO: 7531 - DNA, 21 bp, Homo Sapiens
ggaggcggcccatgtggcgga

SEQ ID NO: 7532 - DNA, 21 bp, Homo Sapiens
gaggcggcccatgtggcggag

SEQ ID NO: 7533 - DNA, 21 bp, Homo Sapiens
aggcggcccatgtggcggagc

SEQ ID NO: 7534 - DNA, 21 bp, Homo Sapiens
ggcggcccatgtggcggagca

SEQ ID NO: 7535 - DNA, 21 bp, Homo Sapiens
gcggcccatgtggcggagcag

SEQ ID NO: 7536 - DNA, 21 bp, Homo Sapiens
cggcccatgtggcggagcagt

SEQ ID NO: 7537 - DNA, 21 bp, Homo Sapiens
ggcccatgtggcggagcagtt

SEQ ID NO: 7538 - DNA, 21 bp, Homo Sapiens
gcccatgtggcggagcagttg

SEQ ID NO: 7539 - DNA, 21 bp, Homo Sapiens
cccatgtggcggagcagttga

SEQ ID NO: 7540 - DNA, 21 bp, Homo Sapiens
ccatgtggcggagcagttgag

SEQ ID NO: 7541 - DNA, 21 bp, Homo Sapiens
tgtggcggagcagttgagagc

SEQ ID NO: 7542 - DNA, 21 bp, Homo Sapiens
gtggcggagcagttgagagcc

SEQ ID NO: 7543 - DNA, 21 bp, Homo Sapiens
tggcggagcagttgagagcct

SEQ ID NO: 7544 - DNA, 21 bp, Homo Sapiens
ggcggagcagttgagagccta

SEQ ID NO: 7545 - DNA, 21 bp, Homo Sapiens
gcggagcagttgagagcctac

SEQ ID NO: 7546 - DNA, 21 bp, Homo Sapiens
cggagcagttgagagcctacc

SEQ ID NO: 7547 - DNA, 21 bp, Homo Sapiens
gttgagagcctacctggaggg

SEQ ID NO: 7548 - DNA, 21 bp, Homo Sapiens
ttgagagcctacctggagggc

SEQ ID NO: 7549 - DNA, 21 bp, Homo Sapiens
tgagagcctacctggagggca

SEQ ID NO: 7550 - DNA, 21 bp, Homo Sapiens
gagagcctacctggagggcac

SEQ ID NO: 7551 - DNA, 21 bp, Homo Sapiens
agagcctacctggagggcacg

SEQ ID NO: 7552 - DNA, 21 bp, Homo Sapiens
gagcctacctggagggcacgt

SEQ ID NO: 7553 - DNA, 21 bp, Homo Sapiens
agcctacctggagggcacgtg

SEQ ID NO: 7554 - DNA, 21 bp, Homo Sapiens
gcctacctggagggcacgtgc

SEQ ID NO: 7555 - DNA, 21 bp, Homo Sapiens
cctacctggagggcacgtgcg

SEQ ID NO: 7556 - DNA, 21 bp, Homo Sapiens
ctacctggagggcacgtgcgt

SEQ ID NO: 7557 - DNA, 21 bp, Homo Sapiens
tacctggagggcacgtgcgtg

SEQ ID NO: 7558 - DNA, 21 bp, Homo Sapiens
acctggagggcacgtgcgtgg

SEQ ID NO: 7559 - DNA, 21 bp, Homo Sapiens
cctggagggcacgtgcgtgga

SEQ ID NO: 7560 - DNA, 21 bp, Homo Sapiens
ctggagggcacgtgcgtggag

SEQ ID NO: 7561 - DNA, 21 bp, Homo Sapiens
tggagggcacgtgcgtggagt

SEQ ID NO: 7562 - DNA, 21 bp, Homo Sapiens
ggagggcacgtgcgtggagtg

SEQ ID NO: 7563 - DNA, 21 bp, Homo Sapiens
gagggcacgtgcgtggagtgg

SEQ ID NO: 7564 - DNA, 21 bp, Homo Sapiens
agggcacgtgcgtggagtggc

SEQ ID NO: 7565 - DNA, 21 bp, Homo Sapiens
gggcacgtgcgtggagtggct

SEQ ID NO: 7566 - DNA, 21 bp, Homo Sapiens
ggcacgtgcgtggagtggctc

SEQ ID NO: 7567 - DNA, 21 bp, Homo Sapiens
gcacgtgcgtggagtggctcc

SEQ ID NO: 7568 - DNA, 21 bp, Homo Sapiens
cacgtgcgtggagtggctccg

SEQ ID NO: 7569 - DNA, 21 bp, Homo Sapiens
acgtgcgtggagtggctccgc

SEQ ID NO: 7570 - DNA, 21 bp, Homo Sapiens
cgtgcgtggagtggctccgca

SEQ ID NO: 7571 - DNA, 21 bp, Homo Sapiens
gtgcgtggagtggctccgcag

SEQ ID NO: 7572 - DNA, 21 bp, Homo Sapiens
tgcgtggagtggctccgcaga

SEQ ID NO: 7573 - DNA, 21 bp, Homo Sapiens
gcgtggagtggctccgcagat

SEQ ID NO: 7574 - DNA, 21 bp, Homo Sapiens
cgtggagtggctccgcagata

SEQ ID NO: 7575 - DNA, 21 bp, Homo Sapiens
gtggagtggctccgcagatac

SEQ ID NO: 7576 - DNA, 21 bp, Homo Sapiens
tggagtggctccgcagatacc

SEQ ID NO: 7577 - DNA, 21 bp, Homo Sapiens
ggagtggctccgcagatacct

SEQ ID NO: 7578 - DNA, 21 bp, Homo Sapiens
gagtggctccgcagatacctg

SEQ ID NO: 7579 - DNA, 21 bp, Homo Sapiens
agtggctccgcagatacctgg

SEQ ID NO: 7580 - DNA, 21 bp, Homo Sapiens
gtggctccgcagatacctgga

SEQ ID NO: 7581 - DNA, 21 bp, Homo Sapiens
tggctccgcagatacctggag

SEQ ID NO: 7582 - DNA, 21 bp, Homo Sapiens
ggctccgcagatacctggaga

SEQ ID NO: 7583 - DNA, 21 bp, Homo Sapiens
ccgcagatacctggagaacgg

SEQ ID NO: 7584 - DNA, 21 bp, Homo Sapiens
cgcagatacctggagaacggg

SEQ ID NO: 7585 - DNA, 21 bp, Homo Sapiens
cctggagaacgggaaggagac

SEQ ID NO: 7586 - DNA, 21 bp, Homo Sapiens
ctggagaacgggaaggagacg

SEQ ID NO: 7587 - DNA, 21 bp, Homo Sapiens
tggagaacgggaaggagacgc

SEQ ID NO: 7588 - DNA, 21 bp, Homo Sapiens
ggagaacgggaaggagacgct

SEQ ID NO: 7589 - DNA, 21 bp, Homo Sapiens
gagaacgggaaggagacgctg

SEQ ID NO: 7590 - DNA, 21 bp, Homo Sapiens
agaacgggaaggagacgctgc

SEQ ID NO: 7591 - DNA, 21 bp, Homo Sapiens
gaacgggaaggagacgctgca

SEQ ID NO: 7592 - DNA, 21 bp, Homo Sapiens
aacgggaaggagacgctgcag

SEQ ID NO: 7593 - DNA, 21 bp, Homo Sapiens
acgggaaggagacgctgcagc

SEQ ID NO: 7594 - DNA, 21 bp, Homo Sapiens
cgggaaggagacgctgcagcg

SEQ ID NO: 7595 - DNA, 21 bp, Homo Sapiens
gggaaggagacgctgcagcgc

SEQ ID NO: 7596 - DNA, 21 bp, Homo Sapiens
ggaaggagacgctgcagcgca

SEQ ID NO: 7597 - DNA, 21 bp, Homo Sapiens
gaaggagacgctgcagcgcac

SEQ ID NO: 7598 - DNA, 21 bp, Homo Sapiens
aaggagacgctgcagcgcacg

SEQ ID NO: 7599 - DNA, 21 bp, Homo Sapiens
aggagacgctgcagcgcacgg

SEQ ID NO: 7600 - DNA, 21 bp, Homo Sapiens
ggagacgctgcagcgcacgga

SEQ ID NO: 7601 - DNA, 21 bp, Homo Sapiens
gagacgctgcagcgcacggac

SEQ ID NO: 7602 - DNA, 21 bp, Homo Sapiens
agacgctgcagcgcacggacg

SEQ ID NO: 7603 - DNA, 21 bp, Homo Sapiens
gacgctgcagcgcacggacgc

SEQ ID NO: 7604 - DNA, 21 bp, Homo Sapiens
acgctgcagcgcacggacgcc

SEQ ID NO: 7605 - DNA, 21 bp, Homo Sapiens
cgctgcagcgcacggacgccc

SEQ ID NO: 7606 - DNA, 21 bp, Homo Sapiens
gctgcagcgcacggacgcccc

SEQ ID NO: 7607 - DNA, 21 bp, Homo Sapiens
ctgcagcgcacggacgccccc

SEQ ID NO: 7608 - DNA, 21 bp, Homo Sapiens
tgcagcgcacggacgccccca

SEQ ID NO: 7609 - DNA, 21 bp, Homo Sapiens
gcagcgcacggacgcccccaa

SEQ ID NO: 7610 - DNA, 21 bp, Homo Sapiens
cagcgcacggacgcccccaaa

SEQ ID NO: 7611 - DNA, 21 bp, Homo Sapiens
agcgcacggacgcccccaaaa

SEQ ID NO: 7612 - DNA, 21 bp, Homo Sapiens
gcgcacggacgcccccaaaac

SEQ ID NO: 7613 - DNA, 21 bp, Homo Sapiens
cgcacggacgcccccaaaacg

SEQ ID NO: 7614 - DNA, 21 bp, Homo Sapiens
gcacggacgcccccaaaacgc

SEQ ID NO: 7615 - DNA, 21 bp, Homo Sapiens
cacggacgcccccaaaacgca

SEQ ID NO: 7616 - DNA, 21 bp, Homo Sapiens
acggacgcccccaaaacgcat

SEQ ID NO: 7617 - DNA, 21 bp, Homo Sapiens
cggacgcccccaaaacgcata

SEQ ID NO: 7618 - DNA, 21 bp, Homo Sapiens
ctcaccacgctgtctctgacc

SEQ ID NO: 7619 - DNA, 21 bp, Homo Sapiens
gaccatgaagccaccctgagg

SEQ ID NO: 7620 - DNA, 21 bp, Homo Sapiens
ccatgaagccaccctgaggtg

SEQ ID NO: 7621 - DNA, 21 bp, Homo Sapiens
catgaagccaccctgaggtgc

SEQ ID NO: 7622 - DNA, 21 bp, Homo Sapiens
tgaagccaccctgaggtgctg

SEQ ID NO: 7623 - DNA, 21 bp, Homo Sapiens
gaagccaccctgaggtgctgg

SEQ ID NO: 7624 - DNA, 21 bp, Homo Sapiens
aagccaccctgaggtgctggg

SEQ ID NO: 7625 - DNA, 21 bp, Homo Sapiens
agccaccctgaggtgctgggc

SEQ ID NO: 7626 - DNA, 21 bp, Homo Sapiens
gccaccctgaggtgctgggcc

SEQ ID NO: 7627 - DNA, 21 bp, Homo Sapiens
ccaccctgaggtgctgggccc

SEQ ID NO: 7628 - DNA, 21 bp, Homo Sapiens
caccctgaggtgctgggccct

SEQ ID NO: 7629 - DNA, 21 bp, Homo Sapiens
accctgaggtgctgggccctg

SEQ ID NO: 7630 - DNA, 21 bp, Homo Sapiens
ccctgaggtgctgggccctga

SEQ ID NO: 7631 - DNA, 21 bp, Homo Sapiens
cctgaggtgctgggccctgag

SEQ ID NO: 7632 - DNA, 21 bp, Homo Sapiens
ctgaggtgctgggccctgagc

SEQ ID NO: 7633 - DNA, 21 bp, Homo Sapiens
tgaggtgctgggccctgagct

SEQ ID NO: 7634 - DNA, 21 bp, Homo Sapiens
gaggtgctgggccctgagctt

SEQ ID NO: 7635 - DNA, 21 bp, Homo Sapiens
aggtgctgggccctgagcttc

SEQ ID NO: 7636 - DNA, 21 bp, Homo Sapiens
ggtgctgggccctgagcttct

SEQ ID NO: 7637 - DNA, 21 bp, Homo Sapiens
gtgctgggccctgagcttcta

SEQ ID NO: 7638 - DNA, 21 bp, Homo Sapiens
tgctgggccctgagcttctac

SEQ ID NO: 7639 - DNA, 21 bp, Homo Sapiens
gctgggccctgagcttctacc

SEQ ID NO: 7640 - DNA, 21 bp, Homo Sapiens
ctgggccctgagcttctaccc

SEQ ID NO: 7641 - DNA, 21 bp, Homo Sapiens
tgggccctgagcttctaccct

SEQ ID NO: 7642 - DNA, 21 bp, Homo Sapiens
gggccctgagcttctaccctg

SEQ ID NO: 7643 - DNA, 21 bp, Homo Sapiens
ggccctgagcttctaccctgc

SEQ ID NO: 7644 - DNA, 21 bp, Homo Sapiens
gccctgagcttctaccctgcg

SEQ ID NO: 7645 - DNA, 21 bp, Homo Sapiens
ccctgagcttctaccctgcgg

SEQ ID NO: 7646 - DNA, 21 bp, Homo Sapiens
cctgagcttctaccctgcgga

SEQ ID NO: 7647 - DNA, 21 bp, Homo Sapiens
ctgagcttctaccctgcggag

SEQ ID NO: 7648 - DNA, 21 bp, Homo Sapiens
ccctgcggagatcacactgac

SEQ ID NO: 7649 - DNA, 21 bp, Homo Sapiens
cctgcggagatcacactgacc

SEQ ID NO: 7650 - DNA, 21 bp, Homo Sapiens
gcggagatcacactgacctgg

SEQ ID NO: 7651 - DNA, 21 bp, Homo Sapiens
cggagatcacactgacctggc

SEQ ID NO: 7652 - DNA, 21 bp, Homo Sapiens
gatcacactgacctggcagcg

SEQ ID NO: 7653 - DNA, 21 bp, Homo Sapiens
atcacactgacctggcagcgg

SEQ ID NO: 7654 - DNA, 21 bp, Homo Sapiens
tcacactgacctggcagcggg

SEQ ID NO: 7655 - DNA, 21 bp, Homo Sapiens
cacactgacctggcagcggga

SEQ ID NO: 7656 - DNA, 21 bp, Homo Sapiens
acactgacctggcagcgggat

SEQ ID NO: 7657 - DNA, 21 bp, Homo Sapiens
cactgacctggcagcgggatg

SEQ ID NO: 7658 - DNA, 21 bp, Homo Sapiens
actgacctggcagcgggatgg

SEQ ID NO: 7659 - DNA, 21 bp, Homo Sapiens
ctgacctggcagcgggatggg

SEQ ID NO: 7660 - DNA, 21 bp, Homo Sapiens
tgacctggcagcgggatgggg

SEQ ID NO: 7661 - DNA, 21 bp, Homo Sapiens
gacctggcagcgggatgggga

SEQ ID NO: 7662 - DNA, 21 bp, Homo Sapiens
acctggcagcgggatggggag

SEQ ID NO: 7663 - DNA, 21 bp, Homo Sapiens
cctggcagcgggatggggagg

SEQ ID NO: 7664 - DNA, 21 bp, Homo Sapiens
ctggcagcgggatggggagga

SEQ ID NO: 7665 - DNA, 21 bp, Homo Sapiens
tggcagcgggatggggaggac

SEQ ID NO: 7666 - DNA, 21 bp, Homo Sapiens
ggcagcgggatggggaggacc

SEQ ID NO: 7667 - DNA, 21 bp, Homo Sapiens
gcagcgggatggggaggacca

SEQ ID NO: 7668 - DNA, 21 bp, Homo Sapiens
cagcgggatggggaggaccag

SEQ ID NO: 7669 - DNA, 21 bp, Homo Sapiens
agcgggatggggaggaccaga

SEQ ID NO: 7670 - DNA, 21 bp, Homo Sapiens
gcgggatggggaggaccagac

SEQ ID NO: 7671 - DNA, 21 bp, Homo Sapiens
cgggatggggaggaccagacc

SEQ ID NO: 7672 - DNA, 21 bp, Homo Sapiens
gggatggggaggaccagaccc

SEQ ID NO: 7673 - DNA, 21 bp, Homo Sapiens
ggatggggaggaccagaccca

SEQ ID NO: 7674 - DNA, 21 bp, Homo Sapiens
gatggggaggaccagacccag

SEQ ID NO: 7675 - DNA, 21 bp, Homo Sapiens
atggggaggaccagacccagg

SEQ ID NO: 7676 - DNA, 21 bp, Homo Sapiens
tggggaggaccagacccagga

SEQ ID NO: 7677 - DNA, 21 bp, Homo Sapiens
ggggaggaccagacccaggac

SEQ ID NO: 7678 - DNA, 21 bp, Homo Sapiens
gggaggaccagacccaggaca

SEQ ID NO: 7679 - DNA, 21 bp, Homo Sapiens
ggaggaccagacccaggacac

SEQ ID NO: 7680 - DNA, 21 bp, Homo Sapiens
gaggaccagacccaggacacg

SEQ ID NO: 7681 - DNA, 21 bp, Homo Sapiens
aggaccagacccaggacacgg

SEQ ID NO: 7682 - DNA, 21 bp, Homo Sapiens
ggaccagacccaggacacgga

SEQ ID NO: 7683 - DNA, 21 bp, Homo Sapiens
gaccagacccaggacacggag

SEQ ID NO: 7684 - DNA, 21 bp, Homo Sapiens
accagacccaggacacggagc

SEQ ID NO: 7685 - DNA, 21 bp, Homo Sapiens
ccagacccaggacacggagct

SEQ ID NO: 7686 - DNA, 21 bp, Homo Sapiens
cagacccaggacacggagctc

SEQ ID NO: 7687 - DNA, 21 bp, Homo Sapiens
agacccaggacacggagctcg

SEQ ID NO: 7688 - DNA, 21 bp, Homo Sapiens
gacccaggacacggagctcgt

SEQ ID NO: 7689 - DNA, 21 bp, Homo Sapiens
acccaggacacggagctcgtg

SEQ ID NO: 7690 - DNA, 21 bp, Homo Sapiens
cccaggacacggagctcgtgg

SEQ ID NO: 7691 - DNA, 21 bp, Homo Sapiens
ccaggacacggagctcgtgga

SEQ ID NO: 7692 - DNA, 21 bp, Homo Sapiens
caggacacggagctcgtggag

SEQ ID NO: 7693 - DNA, 21 bp, Homo Sapiens
aggacacggagctcgtggaga

SEQ ID NO: 7694 - DNA, 21 bp, Homo Sapiens
ggacacggagctcgtggagac

SEQ ID NO: 7695 - DNA, 21 bp, Homo Sapiens
gacacggagctcgtggagacc

SEQ ID NO: 7696 - DNA, 21 bp, Homo Sapiens
acacggagctcgtggagacca

SEQ ID NO: 7697 - DNA, 21 bp, Homo Sapiens
cacggagctcgtggagaccag

SEQ ID NO: 7698 - DNA, 21 bp, Homo Sapiens
acggagctcgtggagaccagg

SEQ ID NO: 7699 - DNA, 21 bp, Homo Sapiens
cggagctcgtggagaccaggc

SEQ ID NO: 7700 - DNA, 21 bp, Homo Sapiens
ggagctcgtggagaccaggcc

SEQ ID NO: 7701 - DNA, 21 bp, Homo Sapiens
gagctcgtggagaccaggcct

SEQ ID NO: 7702 - DNA, 21 bp, Homo Sapiens
agctcgtggagaccaggcctg

SEQ ID NO: 7703 - DNA, 21 bp, Homo Sapiens
gctcgtggagaccaggcctgc

SEQ ID NO: 7704 - DNA, 21 bp, Homo Sapiens
ctcgtggagaccaggcctgca

SEQ ID NO: 7705 - DNA, 21 bp, Homo Sapiens
tcgtggagaccaggcctgcag

SEQ ID NO: 7706 - DNA, 21 bp, Homo Sapiens
cgtggagaccaggcctgcagg

SEQ ID NO: 7707 - DNA, 21 bp, Homo Sapiens
gtggagaccaggcctgcaggg

SEQ ID NO: 7708 - DNA, 21 bp, Homo Sapiens
tggagaccaggcctgcagggg

SEQ ID NO: 7709 - DNA, 21 bp, Homo Sapiens
ggagaccaggcctgcagggga

SEQ ID NO: 7710 - DNA, 21 bp, Homo Sapiens
gagaccaggcctgcaggggat

SEQ ID NO: 7711 - DNA, 21 bp, Homo Sapiens
agaccaggcctgcaggggatg

SEQ ID NO: 7712 - DNA, 21 bp, Homo Sapiens
gaccaggcctgcaggggatgg

SEQ ID NO: 7713 - DNA, 21 bp, Homo Sapiens
accaggcctgcaggggatgga

SEQ ID NO: 7714 - DNA, 21 bp, Homo Sapiens
ccaggcctgcaggggatggaa

SEQ ID NO: 7715 - DNA, 21 bp, Homo Sapiens
caggcctgcaggggatggaac

SEQ ID NO: 7716 - DNA, 21 bp, Homo Sapiens
aggcctgcaggggatggaacc

SEQ ID NO: 7717 - DNA, 21 bp, Homo Sapiens
ggcctgcaggggatggaacct

SEQ ID NO: 7718 - DNA, 21 bp, Homo Sapiens
gcctgcaggggatggaacctt

SEQ ID NO: 7719 - DNA, 21 bp, Homo Sapiens
cctgcaggggatggaaccttc

SEQ ID NO: 7720 - DNA, 21 bp, Homo Sapiens
ctgcaggggatggaaccttcc

SEQ ID NO: 7721 - DNA, 21 bp, Homo Sapiens
gcaggggatggaaccttccag

SEQ ID NO: 7722 - DNA, 21 bp, Homo Sapiens
ggaaccttccagaagtgggcg

SEQ ID NO: 7723 - DNA, 21 bp, Homo Sapiens
gaaccttccagaagtgggcgg

SEQ ID NO: 7724 - DNA, 21 bp, Homo Sapiens
aaccttccagaagtgggcggc

SEQ ID NO: 7725 - DNA, 21 bp, Homo Sapiens
accttccagaagtgggcggct

SEQ ID NO: 7726 - DNA, 21 bp, Homo Sapiens
ccttccagaagtgggcggctg

SEQ ID NO: 7727 - DNA, 21 bp, Homo Sapiens
cttccagaagtgggcggctgt

SEQ ID NO: 7728 - DNA, 21 bp, Homo Sapiens
ttccagaagtgggcggctgtg

SEQ ID NO: 7729 - DNA, 21 bp, Homo Sapiens
tccagaagtgggcggctgtgg

SEQ ID NO: 7730 - DNA, 21 bp, Homo Sapiens
ccagaagtgggcggctgtggt

SEQ ID NO: 7731 - DNA, 21 bp, Homo Sapiens
cagaagtgggcggctgtggtg

SEQ ID NO: 7732 - DNA, 21 bp, Homo Sapiens
agaagtgggcggctgtggtgg

SEQ ID NO: 7733 - DNA, 21 bp, Homo Sapiens
gaagtgggcggctgtggtggt

SEQ ID NO: 7734 - DNA, 21 bp, Homo Sapiens
aagtgggcggctgtggtggtg

SEQ ID NO: 7735 - DNA, 21 bp, Homo Sapiens
agtgggcggctgtggtggtgc

SEQ ID NO: 7736 - DNA, 21 bp, Homo Sapiens
gtgggcggctgtggtggtgcc

SEQ ID NO: 7737 - DNA, 21 bp, Homo Sapiens
tgggcggctgtggtggtgcct

SEQ ID NO: 7738 - DNA, 21 bp, Homo Sapiens
gggcggctgtggtggtgcctt

SEQ ID NO: 7739 - DNA, 21 bp, Homo Sapiens
ggcggctgtggtggtgccttc

SEQ ID NO: 7740 - DNA, 21 bp, Homo Sapiens
gcggctgtggtggtgccttct

SEQ ID NO: 7741 - DNA, 21 bp, Homo Sapiens
cggctgtggtggtgccttctg

SEQ ID NO: 7742 - DNA, 21 bp, Homo Sapiens
ggctgtggtggtgccttctgg

SEQ ID NO: 7743 - DNA, 21 bp, Homo Sapiens
gctgtggtggtgccttctgga

SEQ ID NO: 7744 - DNA, 21 bp, Homo Sapiens
ctgtggtggtgccttctggac

SEQ ID NO: 7745 - DNA, 21 bp, Homo Sapiens
gtggtggtgccttctggacag

SEQ ID NO: 7746 - DNA, 21 bp, Homo Sapiens
tggtggtgccttctggacagg

SEQ ID NO: 7747 - DNA, 21 bp, Homo Sapiens
ggtggtgccttctggacagga

SEQ ID NO: 7748 - DNA, 21 bp, Homo Sapiens
gtggtgccttctggacaggag

SEQ ID NO: 7749 - DNA, 21 bp, Homo Sapiens
tggtgccttctggacaggagc

SEQ ID NO: 7750 - DNA, 21 bp, Homo Sapiens
ggtgccttctggacaggagca

SEQ ID NO: 7751 - DNA, 21 bp, Homo Sapiens
gtgccttctggacaggagcag

SEQ ID NO: 7752 - DNA, 21 bp, Homo Sapiens
gccttctggacaggagcagag

SEQ ID NO: 7753 - DNA, 21 bp, Homo Sapiens
cctgccatgtgcagcatgagg

SEQ ID NO: 7754 - DNA, 21 bp, Homo Sapiens
ctgccatgtgcagcatgaggg

SEQ ID NO: 7755 - DNA, 21 bp, Homo Sapiens
gtgcagcatgagggtttgccc

SEQ ID NO: 7756 - DNA, 21 bp, Homo Sapiens
gcatgagggtttgcccaagcc

SEQ ID NO: 7757 - DNA, 21 bp, Homo Sapiens
catgagggtttgcccaagccc

SEQ ID NO: 7758 - DNA, 21 bp, Homo Sapiens
atgagggtttgcccaagcccc

SEQ ID NO: 7759 - DNA, 21 bp, Homo Sapiens
tgagggtttgcccaagcccct

SEQ ID NO: 7760 - DNA, 21 bp, Homo Sapiens
gagggtttgcccaagcccctc

SEQ ID NO: 7761 - DNA, 21 bp, Homo Sapiens
agggtttgcccaagcccctca

SEQ ID NO: 7762 - DNA, 21 bp, Homo Sapiens
gggtttgcccaagcccctcac

SEQ ID NO: 7763 - DNA, 21 bp, Homo Sapiens
ggtttgcccaagcccctcacc

SEQ ID NO: 7764 - DNA, 21 bp, Homo Sapiens
gtttgcccaagcccctcaccc

SEQ ID NO: 7765 - DNA, 21 bp, Homo Sapiens
tttgcccaagcccctcaccct

SEQ ID NO: 7766 - DNA, 21 bp, Homo Sapiens
ttgcccaagcccctcaccctg

SEQ ID NO: 7767 - DNA, 21 bp, Homo Sapiens
tgcccaagcccctcaccctga

SEQ ID NO: 7768 - DNA, 21 bp, Homo Sapiens
gcccaagcccctcaccctgag

SEQ ID NO: 7769 - DNA, 21 bp, Homo Sapiens
cccaagcccctcaccctgaga

SEQ ID NO: 7770 - DNA, 21 bp, Homo Sapiens
ccaagcccctcaccctgagat

SEQ ID NO: 7771 - DNA, 21 bp, Homo Sapiens
caagcccctcaccctgagatg

SEQ ID NO: 7772 - DNA, 21 bp, Homo Sapiens
aagcccctcaccctgagatgg

SEQ ID NO: 7773 - DNA, 21 bp, Homo Sapiens
agcccctcaccctgagatggg

SEQ ID NO: 7774 - DNA, 21 bp, Homo Sapiens
gcccctcaccctgagatggga

SEQ ID NO: 7775 - DNA, 21 bp, Homo Sapiens
cccctcaccctgagatgggag

SEQ ID NO: 7776 - DNA, 21 bp, Homo Sapiens
ccctcaccctgagatgggagc

SEQ ID NO: 7777 - DNA, 21 bp, Homo Sapiens
cctcaccctgagatgggagcc

SEQ ID NO: 7778 - DNA, 21 bp, Homo Sapiens
ctcaccctgagatgggagccg

SEQ ID NO: 7779 - DNA, 21 bp, Homo Sapiens
tcaccctgagatgggagccgt

SEQ ID NO: 7780 - DNA, 21 bp, Homo Sapiens
caccctgagatgggagccgtc

SEQ ID NO: 7781 - DNA, 21 bp, Homo Sapiens
accctgagatgggagccgtct

SEQ ID NO: 7782 - DNA, 21 bp, Homo Sapiens
ccctgagatgggagccgtctt

SEQ ID NO: 7783 - DNA, 21 bp, Homo Sapiens
cctgagatgggagccgtcttc

SEQ ID NO: 7784 - DNA, 21 bp, Homo Sapiens
ctgagatgggagccgtcttcc

SEQ ID NO: 7785 - DNA, 21 bp, Homo Sapiens
tgagatgggagccgtcttccc

SEQ ID NO: 7786 - DNA, 21 bp, Homo Sapiens
gagatgggagccgtcttccca

SEQ ID NO: 7787 - DNA, 21 bp, Homo Sapiens
agatgggagccgtcttcccag

SEQ ID NO: 7788 - DNA, 21 bp, Homo Sapiens
gatgggagccgtcttcccagc

SEQ ID NO: 7789 - DNA, 21 bp, Homo Sapiens
atgggagccgtcttcccagcc

SEQ ID NO: 7790 - DNA, 21 bp, Homo Sapiens
tgggagccgtcttcccagccc

SEQ ID NO: 7791 - DNA, 21 bp, Homo Sapiens
gggagccgtcttcccagccca

SEQ ID NO: 7792 - DNA, 21 bp, Homo Sapiens
ggagccgtcttcccagcccac

SEQ ID NO: 7793 - DNA, 21 bp, Homo Sapiens
gagccgtcttcccagcccacc

SEQ ID NO: 7794 - DNA, 21 bp, Homo Sapiens
agccgtcttcccagcccacca

SEQ ID NO: 7795 - DNA, 21 bp, Homo Sapiens
gccgtcttcccagcccaccat

SEQ ID NO: 7796 - DNA, 21 bp, Homo Sapiens
ccgtcttcccagcccaccatc

SEQ ID NO: 7797 - DNA, 21 bp, Homo Sapiens
cgtcttcccagcccaccatcc

SEQ ID NO: 7798 - DNA, 21 bp, Homo Sapiens
gtcttcccagcccaccatccc

SEQ ID NO: 7799 - DNA, 21 bp, Homo Sapiens
tcttcccagcccaccatcccc

SEQ ID NO: 7800 - DNA, 21 bp, Homo Sapiens
cttcccagcccaccatcccca

SEQ ID NO: 7801 - DNA, 21 bp, Homo Sapiens
ttcccagcccaccatccccat

SEQ ID NO: 7802 - DNA, 21 bp, Homo Sapiens
tcccagcccaccatccccatc

SEQ ID NO: 7803 - DNA, 21 bp, Homo Sapiens
cccagcccaccatccccatcg

SEQ ID NO: 7804 - DNA, 21 bp, Homo Sapiens
ccagcccaccatccccatcgt

SEQ ID NO: 7805 - DNA, 21 bp, Homo Sapiens
cagcccaccatccccatcgtg

SEQ ID NO: 7806 - DNA, 21 bp, Homo Sapiens
agcccaccatccccatcgtgg

SEQ ID NO: 7807 - DNA, 21 bp, Homo Sapiens
gcccaccatccccatcgtggg

SEQ ID NO: 7808 - DNA, 21 bp, Homo Sapiens
cccaccatccccatcgtgggc

SEQ ID NO: 7809 - DNA, 21 bp, Homo Sapiens
ccaccatccccatcgtgggca

SEQ ID NO: 7810 - DNA, 21 bp, Homo Sapiens
caccatccccatcgtgggcat

SEQ ID NO: 7811 - DNA, 21 bp, Homo Sapiens
accatccccatcgtgggcatc

SEQ ID NO: 7812 - DNA, 21 bp, Homo Sapiens
ccatccccatcgtgggcatca

SEQ ID NO: 7813 - DNA, 21 bp, Homo Sapiens
ccccatcgtgggcatcattgc

SEQ ID NO: 7814 - DNA, 21 bp, Homo Sapiens
tcgtgggcatcattgctggcc

SEQ ID NO: 7815 - DNA, 21 bp, Homo Sapiens
cgtgggcatcattgctggcct

SEQ ID NO: 7816 - DNA, 21 bp, Homo Sapiens
gtgggcatcattgctggcctg

SEQ ID NO: 7817 - DNA, 21 bp, Homo Sapiens
tgggcatcattgctggcctgg

SEQ ID NO: 7818 - DNA, 21 bp, Homo Sapiens
gggcatcattgctggcctggt

SEQ ID NO: 7819 - DNA, 21 bp, Homo Sapiens
gatcactggagctgtggtcgc

SEQ ID NO: 7820 - DNA, 21 bp, Homo Sapiens
tcactggagctgtggtcgctg

SEQ ID NO: 7821 - DNA, 21 bp, Homo Sapiens
cactggagctgtggtcgctgc

SEQ ID NO: 7822 - DNA, 21 bp, Homo Sapiens
actggagctgtggtcgctgct

SEQ ID NO: 7823 - DNA, 21 bp, Homo Sapiens
ctggagctgtggtcgctgctg

SEQ ID NO: 7824 - DNA, 21 bp, Homo Sapiens
tggagctgtggtcgctgctgt

SEQ ID NO: 7825 - DNA, 21 bp, Homo Sapiens
ggagctgtggtcgctgctgtg

SEQ ID NO: 7826 - DNA, 21 bp, Homo Sapiens
gagctgtggtcgctgctgtga

SEQ ID NO: 7827 - DNA, 21 bp, Homo Sapiens
gctgtggtcgctgctgtgatg

SEQ ID NO: 7828 - DNA, 21 bp, Homo Sapiens
gtggtcgctgctgtgatgtgg

SEQ ID NO: 7829 - DNA, 21 bp, Homo Sapiens
ggtcgctgctgtgatgtggag

SEQ ID NO: 7830 - DNA, 21 bp, Homo Sapiens
gtcgctgctgtgatgtggagg

SEQ ID NO: 7831 - DNA, 21 bp, Homo Sapiens
cgctgctgtgatgtggaggag

SEQ ID NO: 7832 - DNA, 21 bp, Homo Sapiens
gctgctgtgatgtggaggagg

SEQ ID NO: 7833 - DNA, 21 bp, Homo Sapiens
aggagggagctactctcaggc

SEQ ID NO: 7834 - DNA, 21 bp, Homo Sapiens
ggagggagctactctcaggct

SEQ ID NO: 7835 - DNA, 21 bp, Homo Sapiens
gagggagctactctcaggctg

SEQ ID NO: 7836 - DNA, 21 bp, Homo Sapiens
agggagctactctcaggctgc

SEQ ID NO: 7837 - DNA, 21 bp, Homo Sapiens
gggagctactctcaggctgca

SEQ ID NO: 7838 - DNA, 21 bp, Homo Sapiens
ggctgcaagcagtgacagtgc

SEQ ID NO: 7839 - DNA, 21 bp, Homo Sapiens
gctgcaagcagtgacagtgcc

SEQ ID NO: 7840 - DNA, 21 bp, Homo Sapiens
ctgcaagcagtgacagtgccc

SEQ ID NO: 7841 - DNA, 21 bp, Homo Sapiens
gcaagcagtgacagtgcccag

SEQ ID NO: 7842 - DNA, 21 bp, Homo Sapiens
caagcagtgacagtgcccagg

SEQ ID NO: 7843 - DNA, 21 bp, Homo Sapiens
aagcagtgacagtgcccaggg

SEQ ID NO: 7844 - DNA, 21 bp, Homo Sapiens
agcagtgacagtgcccagggc

SEQ ID NO: 7845 - DNA, 21 bp, Homo Sapiens
gcagtgacagtgcccagggct

SEQ ID NO: 7846 - DNA, 21 bp, Homo Sapiens
cagtgacagtgcccagggctc

SEQ ID NO: 7847 - DNA, 21 bp, Homo Sapiens
agtgacagtgcccagggctct

SEQ ID NO: 7848 - DNA, 21 bp, Homo Sapiens
gtgacagtgcccagggctctg

SEQ ID NO: 7849 - DNA, 21 bp, Homo Sapiens
tgacagtgcccagggctctga

SEQ ID NO: 7850 - DNA, 21 bp, Homo Sapiens
gacagtgcccagggctctgat

SEQ ID NO: 7851 - DNA, 21 bp, Homo Sapiens
acagtgcccagggctctgatg

SEQ ID NO: 7852 - DNA, 21 bp, Homo Sapiens
cagtgcccagggctctgatgt

SEQ ID NO: 7853 - DNA, 21 bp, Homo Sapiens
agtgcccagggctctgatgtg

SEQ ID NO: 7854 - DNA, 21 bp, Homo Sapiens
gtgcccagggctctgatgtgt

SEQ ID NO: 7855 - DNA, 21 bp, Homo Sapiens
tgcccagggctctgatgtgtc

SEQ ID NO: 7856 - DNA, 21 bp, Homo Sapiens
gcccagggctctgatgtgtct

SEQ ID NO: 7857 - DNA, 21 bp, Homo Sapiens
cccagggctctgatgtgtctc

SEQ ID NO: 7858 - DNA, 21 bp, Homo Sapiens
gagacagctgccttgtgtggg

SEQ ID NO: 7859 - DNA, 21 bp, Homo Sapiens
gacagctgccttgtgtgggac

SEQ ID NO: 7860 - DNA, 21 bp, Homo Sapiens
cagctgccttgtgtgggactg

SEQ ID NO: 7861 - DNA, 21 bp, Homo Sapiens
gctgccttgtgtgggactgag

SEQ ID NO: 7862 - DNA, 21 bp, Homo Sapiens
gccttgtgtgggactgagagg

SEQ ID NO: 7863 - DNA, 21 bp, Homo Sapiens
ccttgtgtgggactgagaggc

SEQ ID NO: 7864 - DNA, 21 bp, Homo Sapiens
atgtgaggaggtggggagacc

SEQ ID NO: 7865 - DNA, 21 bp, Homo Sapiens
tgtgaggaggtggggagacca

SEQ ID NO: 7866 - DNA, 21 bp, Homo Sapiens
gtgaggaggtggggagaccac

SEQ ID NO: 7867 - DNA, 21 bp, Homo Sapiens
tgaggaggtggggagaccacc

SEQ ID NO: 7868 - DNA, 21 bp, Homo Sapiens
gaggaggtggggagaccaccc

SEQ ID NO: 7869 - DNA, 21 bp, Homo Sapiens
aggaggtggggagaccacccc

SEQ ID NO: 7870 - DNA, 21 bp, Homo Sapiens
ggaggtggggagaccacccca

SEQ ID NO: 7871 - DNA, 21 bp, Homo Sapiens
gaggtggggagaccaccccac

SEQ ID NO: 7872 - DNA, 21 bp, Homo Sapiens
aggtggggagaccaccccacc

SEQ ID NO: 7873 - DNA, 21 bp, Homo Sapiens
ggtggggagaccaccccaccc

SEQ ID NO: 7874 - DNA, 21 bp, Homo Sapiens
gtggggagaccaccccacccc

SEQ ID NO: 7875 - DNA, 21 bp, Homo Sapiens
tggggagaccaccccaccccc

SEQ ID NO: 7876 - DNA, 21 bp, Homo Sapiens
ggggagaccaccccaccccca

SEQ ID NO: 7877 - DNA, 21 bp, Homo Sapiens
gggagaccaccccacccccat

SEQ ID NO: 7878 - DNA, 21 bp, Homo Sapiens
ggagaccaccccacccccatg

SEQ ID NO: 7879 - DNA, 21 bp, Homo Sapiens
gagaccaccccacccccatgt

SEQ ID NO: 7880 - DNA, 21 bp, Homo Sapiens
agaccaccccacccccatgtc

SEQ ID NO: 7881 - DNA, 21 bp, Homo Sapiens
gaccaccccacccccatgtcc

SEQ ID NO: 7882 - DNA, 21 bp, Homo Sapiens
accaccccacccccatgtcca

SEQ ID NO: 7883 - DNA, 21 bp, Homo Sapiens
ccaccccacccccatgtccac

SEQ ID NO: 7884 - DNA, 21 bp, Homo Sapiens
caccccacccccatgtccacc

SEQ ID NO: 7885 - DNA, 21 bp, Homo Sapiens
accccacccccatgtccacca

SEQ ID NO: 7886 - DNA, 21 bp, Homo Sapiens
ccccacccccatgtccaccat

SEQ ID NO: 7887 - DNA, 21 bp, Homo Sapiens
cccacccccatgtccaccatg

SEQ ID NO: 7888 - DNA, 21 bp, Homo Sapiens
ccacccccatgtccaccatga

SEQ ID NO: 7889 - DNA, 21 bp, Homo Sapiens
cacccccatgtccaccatgac

SEQ ID NO: 7890 - DNA, 21 bp, Homo Sapiens
acccccatgtccaccatgacc

SEQ ID NO: 7891 - DNA, 21 bp, Homo Sapiens
cccccatgtccaccatgaccc

SEQ ID NO: 7892 - DNA, 21 bp, Homo Sapiens
ccccatgtccaccatgaccct

SEQ ID NO: 7893 - DNA, 21 bp, Homo Sapiens
cccatgtccaccatgaccctc

SEQ ID NO: 7894 - DNA, 21 bp, Homo Sapiens
gtccaccatgaccctcttccc

SEQ ID NO: 7895 - DNA, 21 bp, Homo Sapiens
ccaccatgaccctcttcccac

SEQ ID NO: 7896 - DNA, 21 bp, Homo Sapiens
caccatgaccctcttcccacg

SEQ ID NO: 7897 - DNA, 21 bp, Homo Sapiens
accatgaccctcttcccacgc

SEQ ID NO: 7898 - DNA, 21 bp, Homo Sapiens
ccatgaccctcttcccacgct

SEQ ID NO: 7899 - DNA, 21 bp, Homo Sapiens
catgaccctcttcccacgctg

SEQ ID NO: 7900 - DNA, 21 bp, Homo Sapiens
tgaccctcttcccacgctgac

SEQ ID NO: 7901 - DNA, 21 bp, Homo Sapiens
gaccctcttcccacgctgacc

SEQ ID NO: 7902 - DNA, 21 bp, Homo Sapiens
accctcttcccacgctgacct

SEQ ID NO: 7903 - DNA, 21 bp, Homo Sapiens
ccctcttcccacgctgacctg

SEQ ID NO: 7904 - DNA, 21 bp, Homo Sapiens
cctcttcccacgctgacctgt

SEQ ID NO: 7905 - DNA, 21 bp, Homo Sapiens
ctcttcccacgctgacctgtg

SEQ ID NO: 7906 - DNA, 21 bp, Homo Sapiens
tcttcccacgctgacctgtgc

SEQ ID NO: 7907 - DNA, 21 bp, Homo Sapiens
cttcccacgctgacctgtgct

SEQ ID NO: 7908 - DNA, 21 bp, Homo Sapiens
ttcccacgctgacctgtgctc

SEQ ID NO: 7909 - DNA, 21 bp, Homo Sapiens
tcccacgctgacctgtgctcc

SEQ ID NO: 7910 - DNA, 21 bp, Homo Sapiens
cccacgctgacctgtgctccc

SEQ ID NO: 7911 - DNA, 21 bp, Homo Sapiens
ccacgctgacctgtgctccct

SEQ ID NO: 7912 - DNA, 21 bp, Homo Sapiens
cacgctgacctgtgctccctc

SEQ ID NO: 7913 - DNA, 21 bp, Homo Sapiens
acgctgacctgtgctccctcc

SEQ ID NO: 7914 - DNA, 21 bp, Homo Sapiens
cgctgacctgtgctccctccc

SEQ ID NO: 7915 - DNA, 21 bp, Homo Sapiens
gctgacctgtgctccctcccc

SEQ ID NO: 7916 - DNA, 21 bp, Homo Sapiens
ctgacctgtgctccctcccca

SEQ ID NO: 7917 - DNA, 21 bp, Homo Sapiens
tgacctgtgctccctccccaa

SEQ ID NO: 7918 - DNA, 21 bp, Homo Sapiens
gacctgtgctccctccccaat

SEQ ID NO: 7919 - DNA, 21 bp, Homo Sapiens
acctgtgctccctccccaatc

SEQ ID NO: 7920 - DNA, 21 bp, Homo Sapiens
cctgtgctccctccccaatca

SEQ ID NO: 7921 - DNA, 21 bp, Homo Sapiens
tcctgttccagagaggtgggg

SEQ ID NO: 7922 - DNA, 21 bp, Homo Sapiens
cctgttccagagaggtggggc

SEQ ID NO: 7923 - DNA, 21 bp, Homo Sapiens
ctgttccagagaggtggggct

SEQ ID NO: 7924 - DNA, 21 bp, Homo Sapiens
tgttccagagaggtggggctg

SEQ ID NO: 7925 - DNA, 21 bp, Homo Sapiens
gttccagagaggtggggctga

SEQ ID NO: 7926 - DNA, 21 bp, Homo Sapiens
ttccagagaggtggggctgag

SEQ ID NO: 7927 - DNA, 21 bp, Homo Sapiens
tccagagaggtggggctgagg

SEQ ID NO: 7928 - DNA, 21 bp, Homo Sapiens
ccagagaggtggggctgaggt

SEQ ID NO: 7929 - DNA, 21 bp, Homo Sapiens
cagagaggtggggctgaggtg

SEQ ID NO: 7930 - DNA, 21 bp, Homo Sapiens
agagaggtggggctgaggtgt

SEQ ID NO: 7931 - DNA, 21 bp, Homo Sapiens
gagaggtggggctgaggtgtc

SEQ ID NO: 7932 - DNA, 21 bp, Homo Sapiens
agaggtggggctgaggtgtct

SEQ ID NO: 7933 - DNA, 21 bp, Homo Sapiens
gaggtggggctgaggtgtctc

SEQ ID NO: 7934 - DNA, 21 bp, Homo Sapiens
aggtggggctgaggtgtctcc

SEQ ID NO: 7935 - DNA, 21 bp, Homo Sapiens
ggtggggctgaggtgtctcca

SEQ ID NO: 7936 - DNA, 21 bp, Homo Sapiens
gtggggctgaggtgtctccat

SEQ ID NO: 7937 - DNA, 21 bp, Homo Sapiens
tggggctgaggtgtctccatc

SEQ ID NO: 7938 - DNA, 21 bp, Homo Sapiens
ggggctgaggtgtctccatct

SEQ ID NO: 7939 - DNA, 21 bp, Homo Sapiens
gggctgaggtgtctccatctc

SEQ ID NO: 7940 - DNA, 22 bp, Homo Sapiens
cagaagcagaggggtcagggcg

SEQ ID NO: 7941 - DNA, 22 bp, Homo Sapiens
agaagcagaggggtcagggcga

SEQ ID NO: 7942 - DNA, 22 bp, Homo Sapiens
gaagcagaggggtcagggcgaa

SEQ ID NO: 7943 - DNA, 22 bp, Homo Sapiens
aagcagaggggtcagggcgaag

SEQ ID NO: 7944 - DNA, 22 bp, Homo Sapiens
agcagaggggtcagggcgaagt

SEQ ID NO: 7945 - DNA, 22 bp, Homo Sapiens
gcagaggggtcagggcgaagtc

SEQ ID NO: 7946 - DNA, 22 bp, Homo Sapiens
cagaggggtcagggcgaagtcc

SEQ ID NO: 7947 - DNA, 22 bp, Homo Sapiens
agaggggtcagggcgaagtccc

SEQ ID NO: 7948 - DNA, 22 bp, Homo Sapiens
gaggggtcagggcgaagtccca

SEQ ID NO: 7949 - DNA, 22 bp, Homo Sapiens
aggggtcagggcgaagtcccag

SEQ ID NO: 7950 - DNA, 22 bp, Homo Sapiens
ggggtcagggcgaagtcccagg

SEQ ID NO: 7951 - DNA, 22 bp, Homo Sapiens
gggtcagggcgaagtcccaggg

SEQ ID NO: 7952 - DNA, 22 bp, Homo Sapiens
ggtcagggcgaagtcccagggc

SEQ ID NO: 7953 - DNA, 22 bp, Homo Sapiens
gtcagggcgaagtcccagggcc

SEQ ID NO: 7954 - DNA, 22 bp, Homo Sapiens
tcagggcgaagtcccagggccc

SEQ ID NO: 7955 - DNA, 22 bp, Homo Sapiens
cagggcgaagtcccagggcccc

SEQ ID NO: 7956 - DNA, 22 bp, Homo Sapiens
agggcgaagtcccagggcccca

SEQ ID NO: 7957 - DNA, 22 bp, Homo Sapiens
gggcgaagtcccagggccccag

SEQ ID NO: 7958 - DNA, 22 bp, Homo Sapiens
ggcgaagtcccagggccccagg

SEQ ID NO: 7959 - DNA, 22 bp, Homo Sapiens
gcgaagtcccagggccccaggc

SEQ ID NO: 7960 - DNA, 22 bp, Homo Sapiens
cgaagtcccagggccccaggcg

SEQ ID NO: 7961 - DNA, 22 bp, Homo Sapiens
gaagtcccagggccccaggcgt

SEQ ID NO: 7962 - DNA, 22 bp, Homo Sapiens
aagtcccagggccccaggcgtg

SEQ ID NO: 7963 - DNA, 22 bp, Homo Sapiens
agtcccagggccccaggcgtgg

SEQ ID NO: 7964 - DNA, 22 bp, Homo Sapiens
gtcccagggccccaggcgtggc

SEQ ID NO: 7965 - DNA, 22 bp, Homo Sapiens
tcccagggccccaggcgtggct

SEQ ID NO: 7966 - DNA, 22 bp, Homo Sapiens
cccagggccccaggcgtggctc

SEQ ID NO: 7967 - DNA, 22 bp, Homo Sapiens
ccagggccccaggcgtggctct

SEQ ID NO: 7968 - DNA, 22 bp, Homo Sapiens
cagggccccaggcgtggctctc

SEQ ID NO: 7969 - DNA, 22 bp, Homo Sapiens
agggccccaggcgtggctctca

SEQ ID NO: 7970 - DNA, 22 bp, Homo Sapiens
gggccccaggcgtggctctcag

SEQ ID NO: 7971 - DNA, 22 bp, Homo Sapiens
ggccccaggcgtggctctcagg

SEQ ID NO: 7972 - DNA, 22 bp, Homo Sapiens
gccccaggcgtggctctcaggg

SEQ ID NO: 7973 - DNA, 22 bp, Homo Sapiens
ccccaggcgtggctctcagggt

SEQ ID NO: 7974 - DNA, 22 bp, Homo Sapiens
cccaggcgtggctctcagggtc

SEQ ID NO: 7975 - DNA, 22 bp, Homo Sapiens
ccaggcgtggctctcagggtct

SEQ ID NO: 7976 - DNA, 22 bp, Homo Sapiens
caggcgtggctctcagggtctc

SEQ ID NO: 7977 - DNA, 22 bp, Homo Sapiens
aggcgtggctctcagggtctca

SEQ ID NO: 7978 - DNA, 22 bp, Homo Sapiens
ggcgtggctctcagggtctcag

SEQ ID NO: 7979 - DNA, 22 bp, Homo Sapiens
gcgtggctctcagggtctcagg

SEQ ID NO: 7980 - DNA, 22 bp, Homo Sapiens
cgtggctctcagggtctcaggc

SEQ ID NO: 7981 - DNA, 22 bp, Homo Sapiens
gtggctctcagggtctcaggcc

SEQ ID NO: 7982 - DNA, 22 bp, Homo Sapiens
tggctctcagggtctcaggccc

SEQ ID NO: 7983 - DNA, 22 bp, Homo Sapiens
ggctctcagggtctcaggcccc

SEQ ID NO: 7984 - DNA, 22 bp, Homo Sapiens
gctctcagggtctcaggccccg

SEQ ID NO: 7985 - DNA, 22 bp, Homo Sapiens
ctctcagggtctcaggccccga

SEQ ID NO: 7986 - DNA, 22 bp, Homo Sapiens
tctcagggtctcaggccccgaa

SEQ ID NO: 7987 - DNA, 22 bp, Homo Sapiens
ctcagggtctcaggccccgaag

SEQ ID NO: 7988 - DNA, 22 bp, Homo Sapiens
tcagggtctcaggccccgaagg

SEQ ID NO: 7989 - DNA, 22 bp, Homo Sapiens
cagggtctcaggccccgaaggc

SEQ ID NO: 7990 - DNA, 22 bp, Homo Sapiens
agggtctcaggccccgaaggcg

SEQ ID NO: 7991 - DNA, 22 bp, Homo Sapiens
gggtctcaggccccgaaggcgg

SEQ ID NO: 7992 - DNA, 22 bp, Homo Sapiens
ggtctcaggccccgaaggcggt

SEQ ID NO: 7993 - DNA, 22 bp, Homo Sapiens
gtctcaggccccgaaggcggtg

SEQ ID NO: 7994 - DNA, 22 bp, Homo Sapiens
tctcaggccccgaaggcggtgt

SEQ ID NO: 7995 - DNA, 22 bp, Homo Sapiens
ctcaggccccgaaggcggtgta

SEQ ID NO: 7996 - DNA, 22 bp, Homo Sapiens
tcaggccccgaaggcggtgtat

SEQ ID NO: 7997 - DNA, 22 bp, Homo Sapiens
caggccccgaaggcggtgtatg

SEQ ID NO: 7998 - DNA, 22 bp, Homo Sapiens
aggccccgaaggcggtgtatgg

SEQ ID NO: 7999 - DNA, 22 bp, Homo Sapiens
ggccccgaaggcggtgtatgga

SEQ ID NO: 8000 - DNA, 22 bp, Homo Sapiens
gccccgaaggcggtgtatggat

SEQ ID NO: 8001 - DNA, 22 bp, Homo Sapiens
ggattggggagtcccagccttg

SEQ ID NO: 8002 - DNA, 22 bp, Homo Sapiens
gattggggagtcccagccttgg

SEQ ID NO: 8003 - DNA, 22 bp, Homo Sapiens
attggggagtcccagccttggg

SEQ ID NO: 8004 - DNA, 22 bp, Homo Sapiens
ttggggagtcccagccttgggg

SEQ ID NO: 8005 - DNA, 22 bp, Homo Sapiens
tggggagtcccagccttgggga

SEQ ID NO: 8006 - DNA, 22 bp, Homo Sapiens
ggggagtcccagccttggggat

SEQ ID NO: 8007 - DNA, 22 bp, Homo Sapiens
gggagtcccagccttggggatt

SEQ ID NO: 8008 - DNA, 22 bp, Homo Sapiens
ggagtcccagccttggggattc

SEQ ID NO: 8009 - DNA, 22 bp, Homo Sapiens
gagtcccagccttggggattcc

SEQ ID NO: 8010 - DNA, 22 bp, Homo Sapiens
agtcccagccttggggattccc

SEQ ID NO: 8011 - DNA, 22 bp, Homo Sapiens
gtcccagccttggggattcccc

SEQ ID NO: 8012 - DNA, 22 bp, Homo Sapiens
tcccagccttggggattcccca

SEQ ID NO: 8013 - DNA, 22 bp, Homo Sapiens
cccagccttggggattccccaa

SEQ ID NO: 8014 - DNA, 22 bp, Homo Sapiens
ccagccttggggattccccaac

SEQ ID NO: 8015 - DNA, 22 bp, Homo Sapiens
gccttggggattccccaactcc

SEQ ID NO: 8016 - DNA, 22 bp, Homo Sapiens
ccttggggattccccaactccg

SEQ ID NO: 8017 - DNA, 22 bp, Homo Sapiens
cttggggattccccaactccgc

SEQ ID NO: 8018 - DNA, 22 bp, Homo Sapiens
tggggattccccaactccgcag

SEQ ID NO: 8019 - DNA, 22 bp, Homo Sapiens
ggggattccccaactccgcagt

SEQ ID NO: 8020 - DNA, 22 bp, Homo Sapiens
cctggatactcacgacgcggac

SEQ ID NO: 8021 - DNA, 22 bp, Homo Sapiens
ctggatactcacgacgcggacc

SEQ ID NO: 8022 - DNA, 22 bp, Homo Sapiens
tggatactcacgacgcggaccc

SEQ ID NO: 8023 - DNA, 22 bp, Homo Sapiens
ggatactcacgacgcggaccca

SEQ ID NO: 8024 - DNA, 22 bp, Homo Sapiens
gatactcacgacgcggacccag

SEQ ID NO: 8025 - DNA, 22 bp, Homo Sapiens
actcacgacgcggacccagttc

SEQ ID NO: 8026 - DNA, 22 bp, Homo Sapiens
ctcacgacgcggacccagttct

SEQ ID NO: 8027 - DNA, 22 bp, Homo Sapiens
tcacgacgcggacccagttctc

SEQ ID NO: 8028 - DNA, 22 bp, Homo Sapiens
cacgacgcggacccagttctca

SEQ ID NO: 8029 - DNA, 22 bp, Homo Sapiens
acgacgcggacccagttctcac

SEQ ID NO: 8030 - DNA, 22 bp, Homo Sapiens
cgacgcggacccagttctcact

SEQ ID NO: 8031 - DNA, 22 bp, Homo Sapiens
gacgcggacccagttctcactc

SEQ ID NO: 8032 - DNA, 22 bp, Homo Sapiens
acgcggacccagttctcactcc

SEQ ID NO: 8033 - DNA, 22 bp, Homo Sapiens
cgcggacccagttctcactccc

SEQ ID NO: 8034 - DNA, 22 bp, Homo Sapiens
gcggacccagttctcactccca

SEQ ID NO: 8035 - DNA, 22 bp, Homo Sapiens
ctcactcccattgggtgtcggg

SEQ ID NO: 8036 - DNA, 22 bp, Homo Sapiens
gccaatcagtgtcgtcgcggtc

SEQ ID NO: 8037 - DNA, 22 bp, Homo Sapiens
ccaatcagtgtcgtcgcggtcg

SEQ ID NO: 8038 - DNA, 22 bp, Homo Sapiens
caatcagtgtcgtcgcggtcgc

SEQ ID NO: 8039 - DNA, 22 bp, Homo Sapiens
aatcagtgtcgtcgcggtcgcg

SEQ ID NO: 8040 - DNA, 22 bp, Homo Sapiens
atcagtgtcgtcgcggtcgcgg

SEQ ID NO: 8041 - DNA, 22 bp, Homo Sapiens
tcagtgtcgtcgcggtcgcggt

SEQ ID NO: 8042 - DNA, 22 bp, Homo Sapiens
cagtgtcgtcgcggtcgcggtt

SEQ ID NO: 8043 - DNA, 22 bp, Homo Sapiens
agtgtcgtcgcggtcgcggttc

SEQ ID NO: 8044 - DNA, 22 bp, Homo Sapiens
gtgtcgtcgcggtcgcggttct

SEQ ID NO: 8045 - DNA, 22 bp, Homo Sapiens
tgtcgtcgcggtcgcggttcta

SEQ ID NO: 8046 - DNA, 22 bp, Homo Sapiens
gtcgtcgcggtcgcggttctaa

SEQ ID NO: 8047 - DNA, 22 bp, Homo Sapiens
cgtcgcggtcgcggttctaaag

SEQ ID NO: 8048 - DNA, 22 bp, Homo Sapiens
cgcggtcgcggttctaaagtcc

SEQ ID NO: 8049 - DNA, 22 bp, Homo Sapiens
gcggtcgcggttctaaagtccg

SEQ ID NO: 8050 - DNA, 22 bp, Homo Sapiens
cggtcgcggttctaaagtccgc

SEQ ID NO: 8051 - DNA, 22 bp, Homo Sapiens
cgcggttctaaagtccgcacgc

SEQ ID NO: 8052 - DNA, 22 bp, Homo Sapiens
ctaaagtccgcacgcacccacc

SEQ ID NO: 8053 - DNA, 22 bp, Homo Sapiens
taaagtccgcacgcacccaccg

SEQ ID NO: 8054 - DNA, 22 bp, Homo Sapiens
aaagtccgcacgcacccaccgg

SEQ ID NO: 8055 - DNA, 22 bp, Homo Sapiens
aagtccgcacgcacccaccggg

SEQ ID NO: 8056 - DNA, 22 bp, Homo Sapiens
agtccgcacgcacccaccggga

SEQ ID NO: 8057 - DNA, 22 bp, Homo Sapiens
gtccgcacgcacccaccgggac

SEQ ID NO: 8058 - DNA, 22 bp, Homo Sapiens
tccgcacgcacccaccgggact

SEQ ID NO: 8059 - DNA, 22 bp, Homo Sapiens
ccgcacgcacccaccgggactc

SEQ ID NO: 8060 - DNA, 22 bp, Homo Sapiens
cgcacgcacccaccgggactca

SEQ ID NO: 8061 - DNA, 22 bp, Homo Sapiens
gcacgcacccaccgggactcag

SEQ ID NO: 8062 - DNA, 22 bp, Homo Sapiens
cacgcacccaccgggactcaga

SEQ ID NO: 8063 - DNA, 22 bp, Homo Sapiens
acgcacccaccgggactcagat

SEQ ID NO: 8064 - DNA, 22 bp, Homo Sapiens
cgcacccaccgggactcagatt

SEQ ID NO: 8065 - DNA, 22 bp, Homo Sapiens
gcacccaccgggactcagattc

SEQ ID NO: 8066 - DNA, 22 bp, Homo Sapiens
cccaccgggactcagattctcc

SEQ ID NO: 8067 - DNA, 22 bp, Homo Sapiens
ccaccgggactcagattctccc

SEQ ID NO: 8068 - DNA, 22 bp, Homo Sapiens
caccgggactcagattctcccc

SEQ ID NO: 8069 - DNA, 22 bp, Homo Sapiens
ccgggactcagattctccccag

SEQ ID NO: 8070 - DNA, 22 bp, Homo Sapiens
ctcagattctccccagacgccg

SEQ ID NO: 8071 - DNA, 22 bp, Homo Sapiens
cagattctccccagacgccgag

SEQ ID NO: 8072 - DNA, 22 bp, Homo Sapiens
agattctccccagacgccgagg

SEQ ID NO: 8073 - DNA, 22 bp, Homo Sapiens
gattctccccagacgccgagga

SEQ ID NO: 8074 - DNA, 22 bp, Homo Sapiens
ttctccccagacgccgaggatg

SEQ ID NO: 8075 - DNA, 22 bp, Homo Sapiens
tctccccagacgccgaggatgg

SEQ ID NO: 8076 - DNA, 22 bp, Homo Sapiens
ctccccagacgccgaggatggc

SEQ ID NO: 8077 - DNA, 22 bp, Homo Sapiens
tccccagacgccgaggatggcc

SEQ ID NO: 8078 - DNA, 22 bp, Homo Sapiens
ccccagacgccgaggatggccg

SEQ ID NO: 8079 - DNA, 22 bp, Homo Sapiens
cccagacgccgaggatggccgt

SEQ ID NO: 8080 - DNA, 22 bp, Homo Sapiens
ccagacgccgaggatggccgtc

SEQ ID NO: 8081 - DNA, 22 bp, Homo Sapiens
cagacgccgaggatggccgtca

SEQ ID NO: 8082 - DNA, 22 bp, Homo Sapiens
agacgccgaggatggccgtcat

SEQ ID NO: 8083 - DNA, 22 bp, Homo Sapiens
gacgccgaggatggccgtcatg

SEQ ID NO: 8084 - DNA, 22 bp, Homo Sapiens
acgccgaggatggccgtcatgg

SEQ ID NO: 8085 - DNA, 22 bp, Homo Sapiens
cgccgaggatggccgtcatggc

SEQ ID NO: 8086 - DNA, 22 bp, Homo Sapiens
gccgaggatggccgtcatggcg

SEQ ID NO: 8087 - DNA, 22 bp, Homo Sapiens
ccgaggatggccgtcatggcgc

SEQ ID NO: 8088 - DNA, 22 bp, Homo Sapiens
cgaggatggccgtcatggcgcc

SEQ ID NO: 8089 - DNA, 22 bp, Homo Sapiens
gaggatggccgtcatggcgccc

SEQ ID NO: 8090 - DNA, 22 bp, Homo Sapiens
aggatggccgtcatggcgcccc

SEQ ID NO: 8091 - DNA, 22 bp, Homo Sapiens
ggatggccgtcatggcgccccg

SEQ ID NO: 8092 - DNA, 22 bp, Homo Sapiens
gatggccgtcatggcgccccga

SEQ ID NO: 8093 - DNA, 22 bp, Homo Sapiens
atggccgtcatggcgccccgaa

SEQ ID NO: 8094 - DNA, 22 bp, Homo Sapiens
tggccgtcatggcgccccgaac

SEQ ID NO: 8095 - DNA, 22 bp, Homo Sapiens
ggccgtcatggcgccccgaacc

SEQ ID NO: 8096 - DNA, 22 bp, Homo Sapiens
gccgtcatggcgccccgaaccc

SEQ ID NO: 8097 - DNA, 22 bp, Homo Sapiens
ccgtcatggcgccccgaaccct

SEQ ID NO: 8098 - DNA, 22 bp, Homo Sapiens
cgtcatggcgccccgaaccctc

SEQ ID NO: 8099 - DNA, 22 bp, Homo Sapiens
gtcatggcgccccgaaccctcg

SEQ ID NO: 8100 - DNA, 22 bp, Homo Sapiens
tcatggcgccccgaaccctcgt

SEQ ID NO: 8101 - DNA, 22 bp, Homo Sapiens
catggcgccccgaaccctcgtc

SEQ ID NO: 8102 - DNA, 22 bp, Homo Sapiens
atggcgccccgaaccctcgtcc

SEQ ID NO: 8103 - DNA, 22 bp, Homo Sapiens
tggcgccccgaaccctcgtcct

SEQ ID NO: 8104 - DNA, 22 bp, Homo Sapiens
ggcgccccgaaccctcgtcctg

SEQ ID NO: 8105 - DNA, 22 bp, Homo Sapiens
gcgccccgaaccctcgtcctgc

SEQ ID NO: 8106 - DNA, 22 bp, Homo Sapiens
cgccccgaaccctcgtcctgct

SEQ ID NO: 8107 - DNA, 22 bp, Homo Sapiens
gccccgaaccctcgtcctgcta

SEQ ID NO: 8108 - DNA, 22 bp, Homo Sapiens
ccccgaaccctcgtcctgctac

SEQ ID NO: 8109 - DNA, 22 bp, Homo Sapiens
cccgaaccctcgtcctgctact

SEQ ID NO: 8110 - DNA, 22 bp, Homo Sapiens
ccgaaccctcgtcctgctactc

SEQ ID NO: 8111 - DNA, 22 bp, Homo Sapiens
accctcgtcctgctactctcgg

SEQ ID NO: 8112 - DNA, 22 bp, Homo Sapiens
ccctcgtcctgctactctcggg

SEQ ID NO: 8113 - DNA, 22 bp, Homo Sapiens
cctcgtcctgctactctcgggg

SEQ ID NO: 8114 - DNA, 22 bp, Homo Sapiens
ctcgtcctgctactctcggggg

SEQ ID NO: 8115 - DNA, 22 bp, Homo Sapiens
tcgtcctgctactctcgggggc

SEQ ID NO: 8116 - DNA, 22 bp, Homo Sapiens
cgtcctgctactctcgggggct

SEQ ID NO: 8117 - DNA, 22 bp, Homo Sapiens
gtcctgctactctcgggggctc

SEQ ID NO: 8118 - DNA, 22 bp, Homo Sapiens
tcctgctactctcgggggctct

SEQ ID NO: 8119 - DNA, 22 bp, Homo Sapiens
cctgctactctcgggggctctg

SEQ ID NO: 8120 - DNA, 22 bp, Homo Sapiens
ctgctactctcgggggctctgg

SEQ ID NO: 8121 - DNA, 22 bp, Homo Sapiens
tgctactctcgggggctctggc

SEQ ID NO: 8122 - DNA, 22 bp, Homo Sapiens
gctactctcgggggctctggcc

SEQ ID NO: 8123 - DNA, 22 bp, Homo Sapiens
ctactctcgggggctctggccc

SEQ ID NO: 8124 - DNA, 22 bp, Homo Sapiens
tactctcgggggctctggccct

SEQ ID NO: 8125 - DNA, 22 bp, Homo Sapiens
actctcgggggctctggccctg

SEQ ID NO: 8126 - DNA, 22 bp, Homo Sapiens
ctctcgggggctctggccctga

SEQ ID NO: 8127 - DNA, 22 bp, Homo Sapiens
tctcgggggctctggccctgac

SEQ ID NO: 8128 - DNA, 22 bp, Homo Sapiens
ctcgggggctctggccctgacc

SEQ ID NO: 8129 - DNA, 22 bp, Homo Sapiens
tcgggggctctggccctgaccc

SEQ ID NO: 8130 - DNA, 22 bp, Homo Sapiens
cgggggctctggccctgaccca

SEQ ID NO: 8131 - DNA, 22 bp, Homo Sapiens
gggggctctggccctgacccag

SEQ ID NO: 8132 - DNA, 22 bp, Homo Sapiens
ggggctctggccctgacccaga

SEQ ID NO: 8133 - DNA, 22 bp, Homo Sapiens
gggctctggccctgacccagac

SEQ ID NO: 8134 - DNA, 22 bp, Homo Sapiens
ggctctggccctgacccagacc

SEQ ID NO: 8135 - DNA, 22 bp, Homo Sapiens
gctctggccctgacccagacct

SEQ ID NO: 8136 - DNA, 22 bp, Homo Sapiens
ctctggccctgacccagacctg

SEQ ID NO: 8137 - DNA, 22 bp, Homo Sapiens
tctggccctgacccagacctgg

SEQ ID NO: 8138 - DNA, 22 bp, Homo Sapiens
ctggccctgacccagacctggg

SEQ ID NO: 8139 - DNA, 22 bp, Homo Sapiens
tggccctgacccagacctgggc

SEQ ID NO: 8140 - DNA, 22 bp, Homo Sapiens
ggccctgacccagacctgggcg

SEQ ID NO: 8141 - DNA, 22 bp, Homo Sapiens
gccctgacccagacctgggcgg

SEQ ID NO: 8142 - DNA, 22 bp, Homo Sapiens
ccctgacccagacctgggcggg

SEQ ID NO: 8143 - DNA, 22 bp, Homo Sapiens
cctgacccagacctgggcgggc

SEQ ID NO: 8144 - DNA, 22 bp, Homo Sapiens
ctgacccagacctgggcgggct

SEQ ID NO: 8145 - DNA, 22 bp, Homo Sapiens
tgacccagacctgggcgggctc

SEQ ID NO: 8146 - DNA, 22 bp, Homo Sapiens
gacccagacctgggcgggctct

SEQ ID NO: 8147 - DNA, 22 bp, Homo Sapiens
acccagacctgggcgggctctc

SEQ ID NO: 8148 - DNA, 22 bp, Homo Sapiens
cccagacctgggcgggctctca

SEQ ID NO: 8149 - DNA, 22 bp, Homo Sapiens
ccagacctgggcgggctctcac

SEQ ID NO: 8150 - DNA, 22 bp, Homo Sapiens
cagacctgggcgggctctcact

SEQ ID NO: 8151 - DNA, 22 bp, Homo Sapiens
agacctgggcgggctctcactc

SEQ ID NO: 8152 - DNA, 22 bp, Homo Sapiens
gacctgggcgggctctcactcc

SEQ ID NO: 8153 - DNA, 22 bp, Homo Sapiens
acctgggcgggctctcactcca

SEQ ID NO: 8154 - DNA, 22 bp, Homo Sapiens
cctgggcgggctctcactccat

SEQ ID NO: 8155 - DNA, 22 bp, Homo Sapiens
ctgggcgggctctcactccatg

SEQ ID NO: 8156 - DNA, 22 bp, Homo Sapiens
tgggcgggctctcactccatga

SEQ ID NO: 8157 - DNA, 22 bp, Homo Sapiens
gggcgggctctcactccatgag

SEQ ID NO: 8158 - DNA, 22 bp, Homo Sapiens
ggcgggctctcactccatgagg

SEQ ID NO: 8159 - DNA, 22 bp, Homo Sapiens
gcgggctctcactccatgaggt

SEQ ID NO: 8160 - DNA, 22 bp, Homo Sapiens
tcttcacatccgtgtcccggcc

SEQ ID NO: 8161 - DNA, 22 bp, Homo Sapiens
cttcacatccgtgtcccggccc

SEQ ID NO: 8162 - DNA, 22 bp, Homo Sapiens
ttcacatccgtgtcccggcccg

SEQ ID NO: 8163 - DNA, 22 bp, Homo Sapiens
tcacatccgtgtcccggcccgg

SEQ ID NO: 8164 - DNA, 22 bp, Homo Sapiens
cacatccgtgtcccggcccggc

SEQ ID NO: 8165 - DNA, 22 bp, Homo Sapiens
acatccgtgtcccggcccggcc

SEQ ID NO: 8166 - DNA, 22 bp, Homo Sapiens
catccgtgtcccggcccggccg

SEQ ID NO: 8167 - DNA, 22 bp, Homo Sapiens
atccgtgtcccggcccggccgc

SEQ ID NO: 8168 - DNA, 22 bp, Homo Sapiens
tccgtgtcccggcccggccgcg

SEQ ID NO: 8169 - DNA, 22 bp, Homo Sapiens
ccgtgtcccggcccggccgcgg

SEQ ID NO: 8170 - DNA, 22 bp, Homo Sapiens
cgtgtcccggcccggccgcggg

SEQ ID NO: 8171 - DNA, 22 bp, Homo Sapiens
gtgtcccggcccggccgcgggg

SEQ ID NO: 8172 - DNA, 22 bp, Homo Sapiens
tgtcccggcccggccgcgggga

SEQ ID NO: 8173 - DNA, 22 bp, Homo Sapiens
gtcccggcccggccgcggggag

SEQ ID NO: 8174 - DNA, 22 bp, Homo Sapiens
tcccggcccggccgcggggagc

SEQ ID NO: 8175 - DNA, 22 bp, Homo Sapiens
cccggcccggccgcggggagcc

SEQ ID NO: 8176 - DNA, 22 bp, Homo Sapiens
ccggcccggccgcggggagccc

SEQ ID NO: 8177 - DNA, 22 bp, Homo Sapiens
cggcccggccgcggggagcccc

SEQ ID NO: 8178 - DNA, 22 bp, Homo Sapiens
ggcccggccgcggggagccccg

SEQ ID NO: 8179 - DNA, 22 bp, Homo Sapiens
gcccggccgcggggagccccgc

SEQ ID NO: 8180 - DNA, 22 bp, Homo Sapiens
cccggccgcggggagccccgct

SEQ ID NO: 8181 - DNA, 22 bp, Homo Sapiens
ccggccgcggggagccccgctt

SEQ ID NO: 8182 - DNA, 22 bp, Homo Sapiens
cggccgcggggagccccgcttc

SEQ ID NO: 8183 - DNA, 22 bp, Homo Sapiens
ggccgcggggagccccgcttca

SEQ ID NO: 8184 - DNA, 22 bp, Homo Sapiens
gccgcggggagccccgcttcat

SEQ ID NO: 8185 - DNA, 22 bp, Homo Sapiens
ccgcggggagccccgcttcatc

SEQ ID NO: 8186 - DNA, 22 bp, Homo Sapiens
cgcggggagccccgcttcatcg

SEQ ID NO: 8187 - DNA, 22 bp, Homo Sapiens
gcggggagccccgcttcatcgc

SEQ ID NO: 8188 - DNA, 22 bp, Homo Sapiens
cggggagccccgcttcatcgca

SEQ ID NO: 8189 - DNA, 22 bp, Homo Sapiens
ggggagccccgcttcatcgcag

SEQ ID NO: 8190 - DNA, 22 bp, Homo Sapiens
gggagccccgcttcatcgcagt

SEQ ID NO: 8191 - DNA, 22 bp, Homo Sapiens
ggagccccgcttcatcgcagtg

SEQ ID NO: 8192 - DNA, 22 bp, Homo Sapiens
gagccccgcttcatcgcagtgg

SEQ ID NO: 8193 - DNA, 22 bp, Homo Sapiens
agccccgcttcatcgcagtggg

SEQ ID NO: 8194 - DNA, 22 bp, Homo Sapiens
gccccgcttcatcgcagtgggc

SEQ ID NO: 8195 - DNA, 22 bp, Homo Sapiens
ccccgcttcatcgcagtgggct

SEQ ID NO: 8196 - DNA, 22 bp, Homo Sapiens
cccgcttcatcgcagtgggcta

SEQ ID NO: 8197 - DNA, 22 bp, Homo Sapiens
ccgcttcatcgcagtgggctac

SEQ ID NO: 8198 - DNA, 22 bp, Homo Sapiens
cgcttcatcgcagtgggctacg

SEQ ID NO: 8199 - DNA, 22 bp, Homo Sapiens
catcgcagtgggctacgtggac

SEQ ID NO: 8200 - DNA, 22 bp, Homo Sapiens
atcgcagtgggctacgtggacg

SEQ ID NO: 8201 - DNA, 22 bp, Homo Sapiens
tcgcagtgggctacgtggacga

SEQ ID NO: 8202 - DNA, 22 bp, Homo Sapiens
cgcagtgggctacgtggacgac

SEQ ID NO: 8203 - DNA, 22 bp, Homo Sapiens
gcagtgggctacgtggacgaca

SEQ ID NO: 8204 - DNA, 22 bp, Homo Sapiens
cagtgggctacgtggacgacac

SEQ ID NO: 8205 - DNA, 22 bp, Homo Sapiens
agtgggctacgtggacgacacg

SEQ ID NO: 8206 - DNA, 22 bp, Homo Sapiens
gtgggctacgtggacgacacgc

SEQ ID NO: 8207 - DNA, 22 bp, Homo Sapiens
tgggctacgtggacgacacgca

SEQ ID NO: 8208 - DNA, 22 bp, Homo Sapiens
gggctacgtggacgacacgcag

SEQ ID NO: 8209 - DNA, 22 bp, Homo Sapiens
ggctacgtggacgacacgcagt

SEQ ID NO: 8210 - DNA, 22 bp, Homo Sapiens
cgtggacgacacgcagttcgtg

SEQ ID NO: 8211 - DNA, 22 bp, Homo Sapiens
gtggacgacacgcagttcgtgc

SEQ ID NO: 8212 - DNA, 22 bp, Homo Sapiens
tggacgacacgcagttcgtgcg

SEQ ID NO: 8213 - DNA, 22 bp, Homo Sapiens
ggacgacacgcagttcgtgcgg

SEQ ID NO: 8214 - DNA, 22 bp, Homo Sapiens
gacgacacgcagttcgtgcggt

SEQ ID NO: 8215 - DNA, 22 bp, Homo Sapiens
cgacacgcagttcgtgcggttc

SEQ ID NO: 8216 - DNA, 22 bp, Homo Sapiens
gacacgcagttcgtgcggttcg

SEQ ID NO: 8217 - DNA, 22 bp, Homo Sapiens
cacgcagttcgtgcggttcgac

SEQ ID NO: 8218 - DNA, 22 bp, Homo Sapiens
cgcagttcgtgcggttcgacag

SEQ ID NO: 8219 - DNA, 22 bp, Homo Sapiens
gcagttcgtgcggttcgacagc

SEQ ID NO: 8220 - DNA, 22 bp, Homo Sapiens
cagttcgtgcggttcgacagcg

SEQ ID NO: 8221 - DNA, 22 bp, Homo Sapiens
gttcgtgcggttcgacagcgac

SEQ ID NO: 8222 - DNA, 22 bp, Homo Sapiens
ttcgtgcggttcgacagcgacg

SEQ ID NO: 8223 - DNA, 22 bp, Homo Sapiens
tcgtgcggttcgacagcgacgc

SEQ ID NO: 8224 - DNA, 22 bp, Homo Sapiens
cgtgcggttcgacagcgacgcc

SEQ ID NO: 8225 - DNA, 22 bp, Homo Sapiens
gtgcggttcgacagcgacgccg

SEQ ID NO: 8226 - DNA, 22 bp, Homo Sapiens
tgcggttcgacagcgacgccgc

SEQ ID NO: 8227 - DNA, 22 bp, Homo Sapiens
gcggttcgacagcgacgccgcg

SEQ ID NO: 8228 - DNA, 22 bp, Homo Sapiens
cggttcgacagcgacgccgcga

SEQ ID NO: 8229 - DNA, 22 bp, Homo Sapiens
ggttcgacagcgacgccgcgag

SEQ ID NO: 8230 - DNA, 22 bp, Homo Sapiens
gttcgacagcgacgccgcgagc

SEQ ID NO: 8231 - DNA, 22 bp, Homo Sapiens
ttcgacagcgacgccgcgagcc

SEQ ID NO: 8232 - DNA, 22 bp, Homo Sapiens
tcgacagcgacgccgcgagcca

SEQ ID NO: 8233 - DNA, 22 bp, Homo Sapiens
cgacagcgacgccgcgagccag

SEQ ID NO: 8234 - DNA, 22 bp, Homo Sapiens
gacagcgacgccgcgagccaga

SEQ ID NO: 8235 - DNA, 22 bp, Homo Sapiens
acagcgacgccgcgagccagag

SEQ ID NO: 8236 - DNA, 22 bp, Homo Sapiens
cagcgacgccgcgagccagagg

SEQ ID NO: 8237 - DNA, 22 bp, Homo Sapiens
agcgacgccgcgagccagagga

SEQ ID NO: 8238 - DNA, 22 bp, Homo Sapiens
gcgacgccgcgagccagaggat

SEQ ID NO: 8239 - DNA, 22 bp, Homo Sapiens
cgacgccgcgagccagaggatg

SEQ ID NO: 8240 - DNA, 22 bp, Homo Sapiens
gacgccgcgagccagaggatgg

SEQ ID NO: 8241 - DNA, 22 bp, Homo Sapiens
acgccgcgagccagaggatgga

SEQ ID NO: 8242 - DNA, 22 bp, Homo Sapiens
cgccgcgagccagaggatggag

SEQ ID NO: 8243 - DNA, 22 bp, Homo Sapiens
gccgcgagccagaggatggagc

SEQ ID NO: 8244 - DNA, 22 bp, Homo Sapiens
ccgcgagccagaggatggagcc

SEQ ID NO: 8245 - DNA, 22 bp, Homo Sapiens
cgcgagccagaggatggagccg

SEQ ID NO: 8246 - DNA, 22 bp, Homo Sapiens
gcgagccagaggatggagccgc

SEQ ID NO: 8247 - DNA, 22 bp, Homo Sapiens
cgagccagaggatggagccgcg

SEQ ID NO: 8248 - DNA, 22 bp, Homo Sapiens
gagccagaggatggagccgcgg

SEQ ID NO: 8249 - DNA, 22 bp, Homo Sapiens
agccagaggatggagccgcggg

SEQ ID NO: 8250 - DNA, 22 bp, Homo Sapiens
gccagaggatggagccgcgggc

SEQ ID NO: 8251 - DNA, 22 bp, Homo Sapiens
ccagaggatggagccgcgggcg

SEQ ID NO: 8252 - DNA, 22 bp, Homo Sapiens
cagaggatggagccgcgggcgc

SEQ ID NO: 8253 - DNA, 22 bp, Homo Sapiens
agaggatggagccgcgggcgcc

SEQ ID NO: 8254 - DNA, 22 bp, Homo Sapiens
gaggatggagccgcgggcgccg

SEQ ID NO: 8255 - DNA, 22 bp, Homo Sapiens
aggatggagccgcgggcgccgt

SEQ ID NO: 8256 - DNA, 22 bp, Homo Sapiens
ggatggagccgcgggcgccgtg

SEQ ID NO: 8257 - DNA, 22 bp, Homo Sapiens
gatggagccgcgggcgccgtgg

SEQ ID NO: 8258 - DNA, 22 bp, Homo Sapiens
atggagccgcgggcgccgtgga

SEQ ID NO: 8259 - DNA, 22 bp, Homo Sapiens
tggagccgcgggcgccgtggat

SEQ ID NO: 8260 - DNA, 22 bp, Homo Sapiens
ggagccgcgggcgccgtggata

SEQ ID NO: 8261 - DNA, 22 bp, Homo Sapiens
gagccgcgggcgccgtggatag

SEQ ID NO: 8262 - DNA, 22 bp, Homo Sapiens
agccgcgggcgccgtggataga

SEQ ID NO: 8263 - DNA, 22 bp, Homo Sapiens
gccgcgggcgccgtggatagag

SEQ ID NO: 8264 - DNA, 22 bp, Homo Sapiens
ccgcgggcgccgtggatagagc

SEQ ID NO: 8265 - DNA, 22 bp, Homo Sapiens
cgcgggcgccgtggatagagca

SEQ ID NO: 8266 - DNA, 22 bp, Homo Sapiens
gcgggcgccgtggatagagcag

SEQ ID NO: 8267 - DNA, 22 bp, Homo Sapiens
cgggcgccgtggatagagcagg

SEQ ID NO: 8268 - DNA, 22 bp, Homo Sapiens
gggcgccgtggatagagcagga

SEQ ID NO: 8269 - DNA, 22 bp, Homo Sapiens
ggcgccgtggatagagcaggag

SEQ ID NO: 8270 - DNA, 22 bp, Homo Sapiens
gcgccgtggatagagcaggagg

SEQ ID NO: 8271 - DNA, 22 bp, Homo Sapiens
cgccgtggatagagcaggaggg

SEQ ID NO: 8272 - DNA, 22 bp, Homo Sapiens
gccgtggatagagcaggagggt

SEQ ID NO: 8273 - DNA, 22 bp, Homo Sapiens
ccgtggatagagcaggagggtc

SEQ ID NO: 8274 - DNA, 22 bp, Homo Sapiens
cgtggatagagcaggagggtcc

SEQ ID NO: 8275 - DNA, 22 bp, Homo Sapiens
gtggatagagcaggagggtccg

SEQ ID NO: 8276 - DNA, 22 bp, Homo Sapiens
tggatagagcaggagggtccgg

SEQ ID NO: 8277 - DNA, 22 bp, Homo Sapiens
ggatagagcaggagggtccgga

SEQ ID NO: 8278 - DNA, 22 bp, Homo Sapiens
gatagagcaggagggtccggag

SEQ ID NO: 8279 - DNA, 22 bp, Homo Sapiens
gcaggagggtccggagtattgg

SEQ ID NO: 8280 - DNA, 22 bp, Homo Sapiens
caggagggtccggagtattggg

SEQ ID NO: 8281 - DNA, 22 bp, Homo Sapiens
ggagggtccggagtattgggac

SEQ ID NO: 8282 - DNA, 22 bp, Homo Sapiens
gagggtccggagtattgggacg

SEQ ID NO: 8283 - DNA, 22 bp, Homo Sapiens
agggtccggagtattgggacgg

SEQ ID NO: 8284 - DNA, 22 bp, Homo Sapiens
gggtccggagtattgggacggg

SEQ ID NO: 8285 - DNA, 22 bp, Homo Sapiens
ggtccggagtattgggacgggg

SEQ ID NO: 8286 - DNA, 22 bp, Homo Sapiens
gtccggagtattgggacgggga

SEQ ID NO: 8287 - DNA, 22 bp, Homo Sapiens
tccggagtattgggacggggag

SEQ ID NO: 8288 - DNA, 22 bp, Homo Sapiens
ccggagtattgggacggggaga

SEQ ID NO: 8289 - DNA, 22 bp, Homo Sapiens
cggagtattgggacggggagac

SEQ ID NO: 8290 - DNA, 22 bp, Homo Sapiens
gtattgggacggggagacacgg

SEQ ID NO: 8291 - DNA, 22 bp, Homo Sapiens
tgggacggggagacacggaaag

SEQ ID NO: 8292 - DNA, 22 bp, Homo Sapiens
gggacggggagacacggaaagt

SEQ ID NO: 8293 - DNA, 22 bp, Homo Sapiens
ggacggggagacacggaaagtg

SEQ ID NO: 8294 - DNA, 22 bp, Homo Sapiens
aggcccactcacagactcaccg

SEQ ID NO: 8295 - DNA, 22 bp, Homo Sapiens
ggcccactcacagactcaccga

SEQ ID NO: 8296 - DNA, 22 bp, Homo Sapiens
gcccactcacagactcaccgag

SEQ ID NO: 8297 - DNA, 22 bp, Homo Sapiens
cagactcaccgagtggacctgg

SEQ ID NO: 8298 - DNA, 22 bp, Homo Sapiens
agactcaccgagtggacctggg

SEQ ID NO: 8299 - DNA, 22 bp, Homo Sapiens
gactcaccgagtggacctgggg

SEQ ID NO: 8300 - DNA, 22 bp, Homo Sapiens
actcaccgagtggacctgggga

SEQ ID NO: 8301 - DNA, 22 bp, Homo Sapiens
ctcaccgagtggacctggggac

SEQ ID NO: 8302 - DNA, 22 bp, Homo Sapiens
tcaccgagtggacctggggacc

SEQ ID NO: 8303 - DNA, 22 bp, Homo Sapiens
caccgagtggacctggggaccc

SEQ ID NO: 8304 - DNA, 22 bp, Homo Sapiens
accgagtggacctggggaccct

SEQ ID NO: 8305 - DNA, 22 bp, Homo Sapiens
ccgagtggacctggggaccctg

SEQ ID NO: 8306 - DNA, 22 bp, Homo Sapiens
cgagtggacctggggaccctgc

SEQ ID NO: 8307 - DNA, 22 bp, Homo Sapiens
gagtggacctggggaccctgcg

SEQ ID NO: 8308 - DNA, 22 bp, Homo Sapiens
agtggacctggggaccctgcgc

SEQ ID NO: 8309 - DNA, 22 bp, Homo Sapiens
gtggacctggggaccctgcgcg

SEQ ID NO: 8310 - DNA, 22 bp, Homo Sapiens
tggacctggggaccctgcgcgg

SEQ ID NO: 8311 - DNA, 22 bp, Homo Sapiens
ggacctggggaccctgcgcggc

SEQ ID NO: 8312 - DNA, 22 bp, Homo Sapiens
gacctggggaccctgcgcggct

SEQ ID NO: 8313 - DNA, 22 bp, Homo Sapiens
acctggggaccctgcgcggcta

SEQ ID NO: 8314 - DNA, 22 bp, Homo Sapiens
cctggggaccctgcgcggctac

SEQ ID NO: 8315 - DNA, 22 bp, Homo Sapiens
ctggggaccctgcgcggctact

SEQ ID NO: 8316 - DNA, 22 bp, Homo Sapiens
tggggaccctgcgcggctacta

SEQ ID NO: 8317 - DNA, 22 bp, Homo Sapiens
ggggaccctgcgcggctactac

SEQ ID NO: 8318 - DNA, 22 bp, Homo Sapiens
gggaccctgcgcggctactaca

SEQ ID NO: 8319 - DNA, 22 bp, Homo Sapiens
ggaccctgcgcggctactacaa

SEQ ID NO: 8320 - DNA, 22 bp, Homo Sapiens
gaccctgcgcggctactacaac

SEQ ID NO: 8321 - DNA, 22 bp, Homo Sapiens
accctgcgcggctactacaacc

SEQ ID NO: 8322 - DNA, 22 bp, Homo Sapiens
ccctgcgcggctactacaacca

SEQ ID NO: 8323 - DNA, 22 bp, Homo Sapiens
cctgcgcggctactacaaccag

SEQ ID NO: 8324 - DNA, 22 bp, Homo Sapiens
gcgcggctactacaaccagagc

SEQ ID NO: 8325 - DNA, 22 bp, Homo Sapiens
cgcggctactacaaccagagcg

SEQ ID NO: 8326 - DNA, 22 bp, Homo Sapiens
actacaaccagagcgaggccgg

SEQ ID NO: 8327 - DNA, 22 bp, Homo Sapiens
ctacaaccagagcgaggccggt

SEQ ID NO: 8328 - DNA, 22 bp, Homo Sapiens
acaaccagagcgaggccggttc

SEQ ID NO: 8329 - DNA, 22 bp, Homo Sapiens
caaccagagcgaggccggttct

SEQ ID NO: 8330 - DNA, 22 bp, Homo Sapiens
aaccagagcgaggccggttctc

SEQ ID NO: 8331 - DNA, 22 bp, Homo Sapiens
accagagcgaggccggttctca

SEQ ID NO: 8332 - DNA, 22 bp, Homo Sapiens
ccagagcgaggccggttctcac

SEQ ID NO: 8333 - DNA, 22 bp, Homo Sapiens
cagagcgaggccggttctcaca

SEQ ID NO: 8334 - DNA, 22 bp, Homo Sapiens
agagcgaggccggttctcacac

SEQ ID NO: 8335 - DNA, 22 bp, Homo Sapiens
gagcgaggccggttctcacacc

SEQ ID NO: 8336 - DNA, 22 bp, Homo Sapiens
agcgaggccggttctcacaccg

SEQ ID NO: 8337 - DNA, 22 bp, Homo Sapiens
gcgaggccggttctcacaccgt

SEQ ID NO: 8338 - DNA, 22 bp, Homo Sapiens
cgaggccggttctcacaccgtc

SEQ ID NO: 8339 - DNA, 22 bp, Homo Sapiens
gaggccggttctcacaccgtcc

SEQ ID NO: 8340 - DNA, 22 bp, Homo Sapiens
aggccggttctcacaccgtcca

SEQ ID NO: 8341 - DNA, 22 bp, Homo Sapiens
ggccggttctcacaccgtccag

SEQ ID NO: 8342 - DNA, 22 bp, Homo Sapiens
gccggttctcacaccgtccaga

SEQ ID NO: 8343 - DNA, 22 bp, Homo Sapiens
ccggttctcacaccgtccagag

SEQ ID NO: 8344 - DNA, 22 bp, Homo Sapiens
cggttctcacaccgtccagagg

SEQ ID NO: 8345 - DNA, 22 bp, Homo Sapiens
ggatgtatggctgcgacgtggg

SEQ ID NO: 8346 - DNA, 22 bp, Homo Sapiens
gatgtatggctgcgacgtgggg

SEQ ID NO: 8347 - DNA, 22 bp, Homo Sapiens
tgtatggctgcgacgtggggtc

SEQ ID NO: 8348 - DNA, 22 bp, Homo Sapiens
gtatggctgcgacgtggggtcg

SEQ ID NO: 8349 - DNA, 22 bp, Homo Sapiens
tatggctgcgacgtggggtcgg

SEQ ID NO: 8350 - DNA, 22 bp, Homo Sapiens
atggctgcgacgtggggtcgga

SEQ ID NO: 8351 - DNA, 22 bp, Homo Sapiens
tggctgcgacgtggggtcggac

SEQ ID NO: 8352 - DNA, 22 bp, Homo Sapiens
ggctgcgacgtggggtcggact

SEQ ID NO: 8353 - DNA, 22 bp, Homo Sapiens
gctgcgacgtggggtcggactg

SEQ ID NO: 8354 - DNA, 22 bp, Homo Sapiens
ctgcgacgtggggtcggactgg

SEQ ID NO: 8355 - DNA, 22 bp, Homo Sapiens
tgcgacgtggggtcggactggc

SEQ ID NO: 8356 - DNA, 22 bp, Homo Sapiens
gcgacgtggggtcggactggcg

SEQ ID NO: 8357 - DNA, 22 bp, Homo Sapiens
cgacgtggggtcggactggcgc

SEQ ID NO: 8358 - DNA, 22 bp, Homo Sapiens
gacgtggggtcggactggcgct

SEQ ID NO: 8359 - DNA, 22 bp, Homo Sapiens
acgtggggtcggactggcgctt

SEQ ID NO: 8360 - DNA, 22 bp, Homo Sapiens
cgtggggtcggactggcgcttc

SEQ ID NO: 8361 - DNA, 22 bp, Homo Sapiens
gtggggtcggactggcgcttcc

SEQ ID NO: 8362 - DNA, 22 bp, Homo Sapiens
tggggtcggactggcgcttcct

SEQ ID NO: 8363 - DNA, 22 bp, Homo Sapiens
ggggtcggactggcgcttcctc

SEQ ID NO: 8364 - DNA, 22 bp, Homo Sapiens
gggtcggactggcgcttcctcc

SEQ ID NO: 8365 - DNA, 22 bp, Homo Sapiens
ggtcggactggcgcttcctccg

SEQ ID NO: 8366 - DNA, 22 bp, Homo Sapiens
gtcggactggcgcttcctccgc

SEQ ID NO: 8367 - DNA, 22 bp, Homo Sapiens
tcggactggcgcttcctccgcg

SEQ ID NO: 8368 - DNA, 22 bp, Homo Sapiens
cggactggcgcttcctccgcgg

SEQ ID NO: 8369 - DNA, 22 bp, Homo Sapiens
ggactggcgcttcctccgcggg

SEQ ID NO: 8370 - DNA, 22 bp, Homo Sapiens
gactggcgcttcctccgcgggt

SEQ ID NO: 8371 - DNA, 22 bp, Homo Sapiens
actggcgcttcctccgcgggta

SEQ ID NO: 8372 - DNA, 22 bp, Homo Sapiens
ctggcgcttcctccgcgggtac

SEQ ID NO: 8373 - DNA, 22 bp, Homo Sapiens
tggcgcttcctccgcgggtacc

SEQ ID NO: 8374 - DNA, 22 bp, Homo Sapiens
ggcgcttcctccgcgggtacca

SEQ ID NO: 8375 - DNA, 22 bp, Homo Sapiens
gcgcttcctccgcgggtaccac

SEQ ID NO: 8376 - DNA, 22 bp, Homo Sapiens
cgcttcctccgcgggtaccacc

SEQ ID NO: 8377 - DNA, 22 bp, Homo Sapiens
gcttcctccgcgggtaccacca

SEQ ID NO: 8378 - DNA, 22 bp, Homo Sapiens
cttcctccgcgggtaccaccag

SEQ ID NO: 8379 - DNA, 22 bp, Homo Sapiens
ttcctccgcgggtaccaccagt

SEQ ID NO: 8380 - DNA, 22 bp, Homo Sapiens
tcctccgcgggtaccaccagta

SEQ ID NO: 8381 - DNA, 22 bp, Homo Sapiens
cctccgcgggtaccaccagtac

SEQ ID NO: 8382 - DNA, 22 bp, Homo Sapiens
ctccgcgggtaccaccagtacg

SEQ ID NO: 8383 - DNA, 22 bp, Homo Sapiens
tccgcgggtaccaccagtacgc

SEQ ID NO: 8384 - DNA, 22 bp, Homo Sapiens
ccgcgggtaccaccagtacgcc

SEQ ID NO: 8385 - DNA, 22 bp, Homo Sapiens
cgcgggtaccaccagtacgcct

SEQ ID NO: 8386 - DNA, 22 bp, Homo Sapiens
gcgggtaccaccagtacgccta

SEQ ID NO: 8387 - DNA, 22 bp, Homo Sapiens
cgggtaccaccagtacgcctac

SEQ ID NO: 8388 - DNA, 22 bp, Homo Sapiens
gggtaccaccagtacgcctacg

SEQ ID NO: 8389 - DNA, 22 bp, Homo Sapiens
accaccagtacgcctacgacgg

SEQ ID NO: 8390 - DNA, 22 bp, Homo Sapiens
ccaccagtacgcctacgacggc

SEQ ID NO: 8391 - DNA, 22 bp, Homo Sapiens
caccagtacgcctacgacggca

SEQ ID NO: 8392 - DNA, 22 bp, Homo Sapiens
ccagtacgcctacgacggcaag

SEQ ID NO: 8393 - DNA, 22 bp, Homo Sapiens
cagtacgcctacgacggcaagg

SEQ ID NO: 8394 - DNA, 22 bp, Homo Sapiens
tcgccctgaaagaggacctgcg

SEQ ID NO: 8395 - DNA, 22 bp, Homo Sapiens
cgccctgaaagaggacctgcgc

SEQ ID NO: 8396 - DNA, 22 bp, Homo Sapiens
gccctgaaagaggacctgcgct

SEQ ID NO: 8397 - DNA, 22 bp, Homo Sapiens
ccctgaaagaggacctgcgctc

SEQ ID NO: 8398 - DNA, 22 bp, Homo Sapiens
agaggacctgcgctcttggacc

SEQ ID NO: 8399 - DNA, 22 bp, Homo Sapiens
gaggacctgcgctcttggaccg

SEQ ID NO: 8400 - DNA, 22 bp, Homo Sapiens
aggacctgcgctcttggaccgc

SEQ ID NO: 8401 - DNA, 22 bp, Homo Sapiens
ggacctgcgctcttggaccgcg

SEQ ID NO: 8402 - DNA, 22 bp, Homo Sapiens
gacctgcgctcttggaccgcgg

SEQ ID NO: 8403 - DNA, 22 bp, Homo Sapiens
acctgcgctcttggaccgcggc

SEQ ID NO: 8404 - DNA, 22 bp, Homo Sapiens
cctgcgctcttggaccgcggcg

SEQ ID NO: 8405 - DNA, 22 bp, Homo Sapiens
ctgcgctcttggaccgcggcgg

SEQ ID NO: 8406 - DNA, 22 bp, Homo Sapiens
tgcgctcttggaccgcggcgga

SEQ ID NO: 8407 - DNA, 22 bp, Homo Sapiens
gcgctcttggaccgcggcggac

SEQ ID NO: 8408 - DNA, 22 bp, Homo Sapiens
cgctcttggaccgcggcggaca

SEQ ID NO: 8409 - DNA, 22 bp, Homo Sapiens
gctcttggaccgcggcggacat

SEQ ID NO: 8410 - DNA, 22 bp, Homo Sapiens
ctcttggaccgcggcggacatg

SEQ ID NO: 8411 - DNA, 22 bp, Homo Sapiens
tcttggaccgcggcggacatgg

SEQ ID NO: 8412 - DNA, 22 bp, Homo Sapiens
cttggaccgcggcggacatggc

SEQ ID NO: 8413 - DNA, 22 bp, Homo Sapiens
ttggaccgcggcggacatggca

SEQ ID NO: 8414 - DNA, 22 bp, Homo Sapiens
tggaccgcggcggacatggcag

SEQ ID NO: 8415 - DNA, 22 bp, Homo Sapiens
ggaccgcggcggacatggcagc

SEQ ID NO: 8416 - DNA, 22 bp, Homo Sapiens
gaccgcggcggacatggcagct

SEQ ID NO: 8417 - DNA, 22 bp, Homo Sapiens
accgcggcggacatggcagctc

SEQ ID NO: 8418 - DNA, 22 bp, Homo Sapiens
ccgcggcggacatggcagctca

SEQ ID NO: 8419 - DNA, 22 bp, Homo Sapiens
cgcggcggacatggcagctcag

SEQ ID NO: 8420 - DNA, 22 bp, Homo Sapiens
gcggcggacatggcagctcaga

SEQ ID NO: 8421 - DNA, 22 bp, Homo Sapiens
cggcggacatggcagctcagac

SEQ ID NO: 8422 - DNA, 22 bp, Homo Sapiens
ggcggacatggcagctcagacc

SEQ ID NO: 8423 - DNA, 22 bp, Homo Sapiens
gcggacatggcagctcagacca

SEQ ID NO: 8424 - DNA, 22 bp, Homo Sapiens
cggacatggcagctcagaccac

SEQ ID NO: 8425 - DNA, 22 bp, Homo Sapiens
ggacatggcagctcagaccacc

SEQ ID NO: 8426 - DNA, 22 bp, Homo Sapiens
ggcagctcagaccaccaagcac

SEQ ID NO: 8427 - DNA, 22 bp, Homo Sapiens
ccaccaagcacaagtgggaggc

SEQ ID NO: 8428 - DNA, 22 bp, Homo Sapiens
caccaagcacaagtgggaggcg

SEQ ID NO: 8429 - DNA, 22 bp, Homo Sapiens
accaagcacaagtgggaggcgg

SEQ ID NO: 8430 - DNA, 22 bp, Homo Sapiens
ccaagcacaagtgggaggcggc

SEQ ID NO: 8431 - DNA, 22 bp, Homo Sapiens
caagcacaagtgggaggcggcc

SEQ ID NO: 8432 - DNA, 22 bp, Homo Sapiens
aagcacaagtgggaggcggccc

SEQ ID NO: 8433 - DNA, 22 bp, Homo Sapiens
agcacaagtgggaggcggccca

SEQ ID NO: 8434 - DNA, 22 bp, Homo Sapiens
gcacaagtgggaggcggcccat

SEQ ID NO: 8435 - DNA, 22 bp, Homo Sapiens
cacaagtgggaggcggcccatg

SEQ ID NO: 8436 - DNA, 22 bp, Homo Sapiens
acaagtgggaggcggcccatgt

SEQ ID NO: 8437 - DNA, 22 bp, Homo Sapiens
caagtgggaggcggcccatgtg

SEQ ID NO: 8438 - DNA, 22 bp, Homo Sapiens
aagtgggaggcggcccatgtgg

SEQ ID NO: 8439 - DNA, 22 bp, Homo Sapiens
agtgggaggcggcccatgtggc

SEQ ID NO: 8440 - DNA, 22 bp, Homo Sapiens
gtgggaggcggcccatgtggcg

SEQ ID NO: 8441 - DNA, 22 bp, Homo Sapiens
tgggaggcggcccatgtggcgg

SEQ ID NO: 8442 - DNA, 22 bp, Homo Sapiens
gggaggcggcccatgtggcgga

SEQ ID NO: 8443 - DNA, 22 bp, Homo Sapiens
ggaggcggcccatgtggcggag

SEQ ID NO: 8444 - DNA, 22 bp, Homo Sapiens
gaggcggcccatgtggcggagc

SEQ ID NO: 8445 - DNA, 22 bp, Homo Sapiens
aggcggcccatgtggcggagca

SEQ ID NO: 8446 - DNA, 22 bp, Homo Sapiens
ggcggcccatgtggcggagcag

SEQ ID NO: 8447 - DNA, 22 bp, Homo Sapiens
gcggcccatgtggcggagcagt

SEQ ID NO: 8448 - DNA, 22 bp, Homo Sapiens
cggcccatgtggcggagcagtt

SEQ ID NO: 8449 - DNA, 22 bp, Homo Sapiens
ggcccatgtggcggagcagttg

SEQ ID NO: 8450 - DNA, 22 bp, Homo Sapiens
gcccatgtggcggagcagttga

SEQ ID NO: 8451 - DNA, 22 bp, Homo Sapiens
cccatgtggcggagcagttgag

SEQ ID NO: 8452 - DNA, 22 bp, Homo Sapiens
tgtggcggagcagttgagagcc

SEQ ID NO: 8453 - DNA, 22 bp, Homo Sapiens
gtggcggagcagttgagagcct

SEQ ID NO: 8454 - DNA, 22 bp, Homo Sapiens
ggcggagcagttgagagcctac

SEQ ID NO: 8455 - DNA, 22 bp, Homo Sapiens
gcggagcagttgagagcctacc

SEQ ID NO: 8456 - DNA, 22 bp, Homo Sapiens
gttgagagcctacctggagggc

SEQ ID NO: 8457 - DNA, 22 bp, Homo Sapiens
tgagagcctacctggagggcac

SEQ ID NO: 8458 - DNA, 22 bp, Homo Sapiens
gagagcctacctggagggcacg

SEQ ID NO: 8459 - DNA, 22 bp, Homo Sapiens
agagcctacctggagggcacgt

SEQ ID NO: 8460 - DNA, 22 bp, Homo Sapiens
gagcctacctggagggcacgtg

SEQ ID NO: 8461 - DNA, 22 bp, Homo Sapiens
agcctacctggagggcacgtgc

SEQ ID NO: 8462 - DNA, 22 bp, Homo Sapiens
gcctacctggagggcacgtgcg

SEQ ID NO: 8463 - DNA, 22 bp, Homo Sapiens
cctacctggagggcacgtgcgt

SEQ ID NO: 8464 - DNA, 22 bp, Homo Sapiens
ctacctggagggcacgtgcgtg

SEQ ID NO: 8465 - DNA, 22 bp, Homo Sapiens
tacctggagggcacgtgcgtgg

SEQ ID NO: 8466 - DNA, 22 bp, Homo Sapiens
acctggagggcacgtgcgtgga

SEQ ID NO: 8467 - DNA, 22 bp, Homo Sapiens
cctggagggcacgtgcgtggag

SEQ ID NO: 8468 - DNA, 22 bp, Homo Sapiens
ctggagggcacgtgcgtggagt

SEQ ID NO: 8469 - DNA, 22 bp, Homo Sapiens
tggagggcacgtgcgtggagtg

SEQ ID NO: 8470 - DNA, 22 bp, Homo Sapiens
ggagggcacgtgcgtggagtgg

SEQ ID NO: 8471 - DNA, 22 bp, Homo Sapiens
gagggcacgtgcgtggagtggc

SEQ ID NO: 8472 - DNA, 22 bp, Homo Sapiens
agggcacgtgcgtggagtggct

SEQ ID NO: 8473 - DNA, 22 bp, Homo Sapiens
gggcacgtgcgtggagtggctc

SEQ ID NO: 8474 - DNA, 22 bp, Homo Sapiens
ggcacgtgcgtggagtggctcc

SEQ ID NO: 8475 - DNA, 22 bp, Homo Sapiens
gcacgtgcgtggagtggctccg

SEQ ID NO: 8476 - DNA, 22 bp, Homo Sapiens
cacgtgcgtggagtggctccgc

SEQ ID NO: 8477 - DNA, 22 bp, Homo Sapiens
acgtgcgtggagtggctccgca

SEQ ID NO: 8478 - DNA, 22 bp, Homo Sapiens
cgtgcgtggagtggctccgcag

SEQ ID NO: 8479 - DNA, 22 bp, Homo Sapiens
gtgcgtggagtggctccgcaga

SEQ ID NO: 8480 - DNA, 22 bp, Homo Sapiens
tgcgtggagtggctccgcagat

SEQ ID NO: 8481 - DNA, 22 bp, Homo Sapiens
gcgtggagtggctccgcagata

SEQ ID NO: 8482 - DNA, 22 bp, Homo Sapiens
cgtggagtggctccgcagatac

SEQ ID NO: 8483 - DNA, 22 bp, Homo Sapiens
gtggagtggctccgcagatacc

SEQ ID NO: 8484 - DNA, 22 bp, Homo Sapiens
ggagtggctccgcagatacctg

SEQ ID NO: 8485 - DNA, 22 bp, Homo Sapiens
gagtggctccgcagatacctgg

SEQ ID NO: 8486 - DNA, 22 bp, Homo Sapiens
gtggctccgcagatacctggag

SEQ ID NO: 8487 - DNA, 22 bp, Homo Sapiens
ccgcagatacctggagaacggg

SEQ ID NO: 8488 - DNA, 22 bp, Homo Sapiens
cctggagaacgggaaggagacg

SEQ ID NO: 8489 - DNA, 22 bp, Homo Sapiens
ctggagaacgggaaggagacgc

SEQ ID NO: 8490 - DNA, 22 bp, Homo Sapiens
ggagaacgggaaggagacgctg

SEQ ID NO: 8491 - DNA, 22 bp, Homo Sapiens
gagaacgggaaggagacgctgc

SEQ ID NO: 8492 - DNA, 22 bp, Homo Sapiens
gaacgggaaggagacgctgcag

SEQ ID NO: 8493 - DNA, 22 bp, Homo Sapiens
aacgggaaggagacgctgcagc

SEQ ID NO: 8494 - DNA, 22 bp, Homo Sapiens
acgggaaggagacgctgcagcg

SEQ ID NO: 8495 - DNA, 22 bp, Homo Sapiens
cgggaaggagacgctgcagcgc

SEQ ID NO: 8496 - DNA, 22 bp, Homo Sapiens
gggaaggagacgctgcagcgca

SEQ ID NO: 8497 - DNA, 22 bp, Homo Sapiens
ggaaggagacgctgcagcgcac

SEQ ID NO: 8498 - DNA, 22 bp, Homo Sapiens
gaaggagacgctgcagcgcacg

SEQ ID NO: 8499 - DNA, 22 bp, Homo Sapiens
aaggagacgctgcagcgcacgg

SEQ ID NO: 8500 - DNA, 22 bp, Homo Sapiens
aggagacgctgcagcgcacgga

SEQ ID NO: 8501 - DNA, 22 bp, Homo Sapiens
ggagacgctgcagcgcacggac

SEQ ID NO: 8502 - DNA, 22 bp, Homo Sapiens
gagacgctgcagcgcacggacg

SEQ ID NO: 8503 - DNA, 22 bp, Homo Sapiens
agacgctgcagcgcacggacgc

SEQ ID NO: 8504 - DNA, 22 bp, Homo Sapiens
gacgctgcagcgcacggacgcc

SEQ ID NO: 8505 - DNA, 22 bp, Homo Sapiens
acgctgcagcgcacggacgccc

SEQ ID NO: 8506 - DNA, 22 bp, Homo Sapiens
cgctgcagcgcacggacgcccc

SEQ ID NO: 8507 - DNA, 22 bp, Homo Sapiens
gctgcagcgcacggacgccccc

SEQ ID NO: 8508 - DNA, 22 bp, Homo Sapiens
ctgcagcgcacggacgccccca

SEQ ID NO: 8509 - DNA, 22 bp, Homo Sapiens
tgcagcgcacggacgcccccaa

SEQ ID NO: 8510 - DNA, 22 bp, Homo Sapiens
gcagcgcacggacgcccccaaa

SEQ ID NO: 8511 - DNA, 22 bp, Homo Sapiens
cagcgcacggacgcccccaaaa

SEQ ID NO: 8512 - DNA, 22 bp, Homo Sapiens
agcgcacggacgcccccaaaac

SEQ ID NO: 8513 - DNA, 22 bp, Homo Sapiens
gcgcacggacgcccccaaaacg

SEQ ID NO: 8514 - DNA, 22 bp, Homo Sapiens
cgcacggacgcccccaaaacgc

SEQ ID NO: 8515 - DNA, 22 bp, Homo Sapiens
gcacggacgcccccaaaacgca

SEQ ID NO: 8516 - DNA, 22 bp, Homo Sapiens
cacggacgcccccaaaacgcat

SEQ ID NO: 8517 - DNA, 22 bp, Homo Sapiens
ccatgaagccaccctgaggtgc

SEQ ID NO: 8518 - DNA, 22 bp, Homo Sapiens
tgaagccaccctgaggtgctgg

SEQ ID NO: 8519 - DNA, 22 bp, Homo Sapiens
gaagccaccctgaggtgctggg

SEQ ID NO: 8520 - DNA, 22 bp, Homo Sapiens
aagccaccctgaggtgctgggc

SEQ ID NO: 8521 - DNA, 22 bp, Homo Sapiens
agccaccctgaggtgctgggcc

SEQ ID NO: 8522 - DNA, 22 bp, Homo Sapiens
gccaccctgaggtgctgggccc

SEQ ID NO: 8523 - DNA, 22 bp, Homo Sapiens
ccaccctgaggtgctgggccct

SEQ ID NO: 8524 - DNA, 22 bp, Homo Sapiens
caccctgaggtgctgggccctg

SEQ ID NO: 8525 - DNA, 22 bp, Homo Sapiens
accctgaggtgctgggccctga

SEQ ID NO: 8526 - DNA, 22 bp, Homo Sapiens
ccctgaggtgctgggccctgag

SEQ ID NO: 8527 - DNA, 22 bp, Homo Sapiens
cctgaggtgctgggccctgagc

SEQ ID NO: 8528 - DNA, 22 bp, Homo Sapiens
ctgaggtgctgggccctgagct

SEQ ID NO: 8529 - DNA, 22 bp, Homo Sapiens
tgaggtgctgggccctgagctt

SEQ ID NO: 8530 - DNA, 22 bp, Homo Sapiens
gaggtgctgggccctgagcttc

SEQ ID NO: 8531 - DNA, 22 bp, Homo Sapiens
aggtgctgggccctgagcttct

SEQ ID NO: 8532 - DNA, 22 bp, Homo Sapiens
ggtgctgggccctgagcttcta

SEQ ID NO: 8533 - DNA, 22 bp, Homo Sapiens
gtgctgggccctgagcttctac

SEQ ID NO: 8534 - DNA, 22 bp, Homo Sapiens
tgctgggccctgagcttctacc

SEQ ID NO: 8535 - DNA, 22 bp, Homo Sapiens
gctgggccctgagcttctaccc

SEQ ID NO: 8536 - DNA, 22 bp, Homo Sapiens
ctgggccctgagcttctaccct

SEQ ID NO: 8537 - DNA, 22 bp, Homo Sapiens
tgggccctgagcttctaccctg

SEQ ID NO: 8538 - DNA, 22 bp, Homo Sapiens
gggccctgagcttctaccctgc

SEQ ID NO: 8539 - DNA, 22 bp, Homo Sapiens
ggccctgagcttctaccctgcg

SEQ ID NO: 8540 - DNA, 22 bp, Homo Sapiens
gccctgagcttctaccctgcgg

SEQ ID NO: 8541 - DNA, 22 bp, Homo Sapiens
ccctgagcttctaccctgcgga

SEQ ID NO: 8542 - DNA, 22 bp, Homo Sapiens
cctgagcttctaccctgcggag

SEQ ID NO: 8543 - DNA, 22 bp, Homo Sapiens
ccctgcggagatcacactgacc

SEQ ID NO: 8544 - DNA, 22 bp, Homo Sapiens
gcggagatcacactgacctggc

SEQ ID NO: 8545 - DNA, 22 bp, Homo Sapiens
gatcacactgacctggcagcgg

SEQ ID NO: 8546 - DNA, 22 bp, Homo Sapiens
atcacactgacctggcagcggg

SEQ ID NO: 8547 - DNA, 22 bp, Homo Sapiens
tcacactgacctggcagcggga

SEQ ID NO: 8548 - DNA, 22 bp, Homo Sapiens
cacactgacctggcagcgggat

SEQ ID NO: 8549 - DNA, 22 bp, Homo Sapiens
acactgacctggcagcgggatg

SEQ ID NO: 8550 - DNA, 22 bp, Homo Sapiens
cactgacctggcagcgggatgg

SEQ ID NO: 8551 - DNA, 22 bp, Homo Sapiens
actgacctggcagcgggatggg

SEQ ID NO: 8552 - DNA, 22 bp, Homo Sapiens
ctgacctggcagcgggatgggg

SEQ ID NO: 8553 - DNA, 22 bp, Homo Sapiens
tgacctggcagcgggatgggga

SEQ ID NO: 8554 - DNA, 22 bp, Homo Sapiens
gacctggcagcgggatggggag

SEQ ID NO: 8555 - DNA, 22 bp, Homo Sapiens
acctggcagcgggatggggagg

SEQ ID NO: 8556 - DNA, 22 bp, Homo Sapiens
cctggcagcgggatggggagga

SEQ ID NO: 8557 - DNA, 22 bp, Homo Sapiens
ctggcagcgggatggggaggac

SEQ ID NO: 8558 - DNA, 22 bp, Homo Sapiens
tggcagcgggatggggaggacc

SEQ ID NO: 8559 - DNA, 22 bp, Homo Sapiens
ggcagcgggatggggaggacca

SEQ ID NO: 8560 - DNA, 22 bp, Homo Sapiens
gcagcgggatggggaggaccag

SEQ ID NO: 8561 - DNA, 22 bp, Homo Sapiens
cagcgggatggggaggaccaga

SEQ ID NO: 8562 - DNA, 22 bp, Homo Sapiens
agcgggatggggaggaccagac

SEQ ID NO: 8563 - DNA, 22 bp, Homo Sapiens
gcgggatggggaggaccagacc

SEQ ID NO: 8564 - DNA, 22 bp, Homo Sapiens
cgggatggggaggaccagaccc

SEQ ID NO: 8565 - DNA, 22 bp, Homo Sapiens
gggatggggaggaccagaccca

SEQ ID NO: 8566 - DNA, 22 bp, Homo Sapiens
ggatggggaggaccagacccag

SEQ ID NO: 8567 - DNA, 22 bp, Homo Sapiens
gatggggaggaccagacccagg

SEQ ID NO: 8568 - DNA, 22 bp, Homo Sapiens
atggggaggaccagacccagga

SEQ ID NO: 8569 - DNA, 22 bp, Homo Sapiens
tggggaggaccagacccaggac

SEQ ID NO: 8570 - DNA, 22 bp, Homo Sapiens
ggggaggaccagacccaggaca

SEQ ID NO: 8571 - DNA, 22 bp, Homo Sapiens
gggaggaccagacccaggacac

SEQ ID NO: 8572 - DNA, 22 bp, Homo Sapiens
ggaggaccagacccaggacacg

SEQ ID NO: 8573 - DNA, 22 bp, Homo Sapiens
gaggaccagacccaggacacgg

SEQ ID NO: 8574 - DNA, 22 bp, Homo Sapiens
aggaccagacccaggacacgga

SEQ ID NO: 8575 - DNA, 22 bp, Homo Sapiens
ggaccagacccaggacacggag

SEQ ID NO: 8576 - DNA, 22 bp, Homo Sapiens
gaccagacccaggacacggagc

SEQ ID NO: 8577 - DNA, 22 bp, Homo Sapiens
accagacccaggacacggagct

SEQ ID NO: 8578 - DNA, 22 bp, Homo Sapiens
ccagacccaggacacggagctc

SEQ ID NO: 8579 - DNA, 22 bp, Homo Sapiens
cagacccaggacacggagctcg

SEQ ID NO: 8580 - DNA, 22 bp, Homo Sapiens
agacccaggacacggagctcgt

SEQ ID NO: 8581 - DNA, 22 bp, Homo Sapiens
gacccaggacacggagctcgtg

SEQ ID NO: 8582 - DNA, 22 bp, Homo Sapiens
acccaggacacggagctcgtgg

SEQ ID NO: 8583 - DNA, 22 bp, Homo Sapiens
cccaggacacggagctcgtgga

SEQ ID NO: 8584 - DNA, 22 bp, Homo Sapiens
ccaggacacggagctcgtggag

SEQ ID NO: 8585 - DNA, 22 bp, Homo Sapiens
caggacacggagctcgtggaga

SEQ ID NO: 8586 - DNA, 22 bp, Homo Sapiens
aggacacggagctcgtggagac

SEQ ID NO: 8587 - DNA, 22 bp, Homo Sapiens
ggacacggagctcgtggagacc

SEQ ID NO: 8588 - DNA, 22 bp, Homo Sapiens
gacacggagctcgtggagacca

SEQ ID NO: 8589 - DNA, 22 bp, Homo Sapiens
acacggagctcgtggagaccag

SEQ ID NO: 8590 - DNA, 22 bp, Homo Sapiens
cacggagctcgtggagaccagg

SEQ ID NO: 8591 - DNA, 22 bp, Homo Sapiens
acggagctcgtggagaccaggc

SEQ ID NO: 8592 - DNA, 22 bp, Homo Sapiens
cggagctcgtggagaccaggcc

SEQ ID NO: 8593 - DNA, 22 bp, Homo Sapiens
ggagctcgtggagaccaggcct

SEQ ID NO: 8594 - DNA, 22 bp, Homo Sapiens
gagctcgtggagaccaggcctg

SEQ ID NO: 8595 - DNA, 22 bp, Homo Sapiens
agctcgtggagaccaggcctgc

SEQ ID NO: 8596 - DNA, 22 bp, Homo Sapiens
gctcgtggagaccaggcctgca

SEQ ID NO: 8597 - DNA, 22 bp, Homo Sapiens
ctcgtggagaccaggcctgcag

SEQ ID NO: 8598 - DNA, 22 bp, Homo Sapiens
tcgtggagaccaggcctgcagg

SEQ ID NO: 8599 - DNA, 22 bp, Homo Sapiens
cgtggagaccaggcctgcaggg

SEQ ID NO: 8600 - DNA, 22 bp, Homo Sapiens
gtggagaccaggcctgcagggg

SEQ ID NO: 8601 - DNA, 22 bp, Homo Sapiens
tggagaccaggcctgcagggga

SEQ ID NO: 8602 - DNA, 22 bp, Homo Sapiens
ggagaccaggcctgcaggggat

SEQ ID NO: 8603 - DNA, 22 bp, Homo Sapiens
gagaccaggcctgcaggggatg

SEQ ID NO: 8604 - DNA, 22 bp, Homo Sapiens
agaccaggcctgcaggggatgg

SEQ ID NO: 8605 - DNA, 22 bp, Homo Sapiens
gaccaggcctgcaggggatgga

SEQ ID NO: 8606 - DNA, 22 bp, Homo Sapiens
accaggcctgcaggggatggaa

SEQ ID NO: 8607 - DNA, 22 bp, Homo Sapiens
ccaggcctgcaggggatggaac

SEQ ID NO: 8608 - DNA, 22 bp, Homo Sapiens
caggcctgcaggggatggaacc

SEQ ID NO: 8609 - DNA, 22 bp, Homo Sapiens
aggcctgcaggggatggaacct

SEQ ID NO: 8610 - DNA, 22 bp, Homo Sapiens
ggcctgcaggggatggaacctt

SEQ ID NO: 8611 - DNA, 22 bp, Homo Sapiens
gcctgcaggggatggaaccttc

SEQ ID NO: 8612 - DNA, 22 bp, Homo Sapiens
cctgcaggggatggaaccttcc

SEQ ID NO: 8613 - DNA, 22 bp, Homo Sapiens
ggaaccttccagaagtgggcgg

SEQ ID NO: 8614 - DNA, 22 bp, Homo Sapiens
gaaccttccagaagtgggcggc

SEQ ID NO: 8615 - DNA, 22 bp, Homo Sapiens
accttccagaagtgggcggctg

SEQ ID NO: 8616 - DNA, 22 bp, Homo Sapiens
ccttccagaagtgggcggctgt

SEQ ID NO: 8617 - DNA, 22 bp, Homo Sapiens
cttccagaagtgggcggctgtg

SEQ ID NO: 8618 - DNA, 22 bp, Homo Sapiens
ttccagaagtgggcggctgtgg

SEQ ID NO: 8619 - DNA, 22 bp, Homo Sapiens
tccagaagtgggcggctgtggt

SEQ ID NO: 8620 - DNA, 22 bp, Homo Sapiens
ccagaagtgggcggctgtggtg

SEQ ID NO: 8621 - DNA, 22 bp, Homo Sapiens
cagaagtgggcggctgtggtgg

SEQ ID NO: 8622 - DNA, 22 bp, Homo Sapiens
agaagtgggcggctgtggtggt

SEQ ID NO: 8623 - DNA, 22 bp, Homo Sapiens
gaagtgggcggctgtggtggtg

SEQ ID NO: 8624 - DNA, 22 bp, Homo Sapiens
aagtgggcggctgtggtggtgc

SEQ ID NO: 8625 - DNA, 22 bp, Homo Sapiens
agtgggcggctgtggtggtgcc

SEQ ID NO: 8626 - DNA, 22 bp, Homo Sapiens
gtgggcggctgtggtggtgcct

SEQ ID NO: 8627 - DNA, 22 bp, Homo Sapiens
tgggcggctgtggtggtgcctt

SEQ ID NO: 8628 - DNA, 22 bp, Homo Sapiens
gggcggctgtggtggtgccttc

SEQ ID NO: 8629 - DNA, 22 bp, Homo Sapiens
ggcggctgtggtggtgccttct

SEQ ID NO: 8630 - DNA, 22 bp, Homo Sapiens
gcggctgtggtggtgccttctg

SEQ ID NO: 8631 - DNA, 22 bp, Homo Sapiens
cggctgtggtggtgccttctgg

SEQ ID NO: 8632 - DNA, 22 bp, Homo Sapiens
ggctgtggtggtgccttctgga

SEQ ID NO: 8633 - DNA, 22 bp, Homo Sapiens
gctgtggtggtgccttctggac

SEQ ID NO: 8634 - DNA, 22 bp, Homo Sapiens
gtggtggtgccttctggacagg

SEQ ID NO: 8635 - DNA, 22 bp, Homo Sapiens
ggtggtgccttctggacaggag

SEQ ID NO: 8636 - DNA, 22 bp, Homo Sapiens
gtggtgccttctggacaggagc

SEQ ID NO: 8637 - DNA, 22 bp, Homo Sapiens
ggtgccttctggacaggagcag

SEQ ID NO: 8638 - DNA, 22 bp, Homo Sapiens
cctgccatgtgcagcatgaggg

SEQ ID NO: 8639 - DNA, 22 bp, Homo Sapiens
gcatgagggtttgcccaagccc

SEQ ID NO: 8640 - DNA, 22 bp, Homo Sapiens
catgagggtttgcccaagcccc

SEQ ID NO: 8641 - DNA, 22 bp, Homo Sapiens
tgagggtttgcccaagcccctc

SEQ ID NO: 8642 - DNA, 22 bp, Homo Sapiens
gagggtttgcccaagcccctca

SEQ ID NO: 8643 - DNA, 22 bp, Homo Sapiens
agggtttgcccaagcccctcac

SEQ ID NO: 8644 - DNA, 22 bp, Homo Sapiens
gggtttgcccaagcccctcacc

SEQ ID NO: 8645 - DNA, 22 bp, Homo Sapiens
ggtttgcccaagcccctcaccc

SEQ ID NO: 8646 - DNA, 22 bp, Homo Sapiens
gtttgcccaagcccctcaccct

SEQ ID NO: 8647 - DNA, 22 bp, Homo Sapiens
tttgcccaagcccctcaccctg

SEQ ID NO: 8648 - DNA, 22 bp, Homo Sapiens
ttgcccaagcccctcaccctga

SEQ ID NO: 8649 - DNA, 22 bp, Homo Sapiens
tgcccaagcccctcaccctgag

SEQ ID NO: 8650 - DNA, 22 bp, Homo Sapiens
gcccaagcccctcaccctgaga

SEQ ID NO: 8651 - DNA, 22 bp, Homo Sapiens
cccaagcccctcaccctgagat

SEQ ID NO: 8652 - DNA, 22 bp, Homo Sapiens
ccaagcccctcaccctgagatg

SEQ ID NO: 8653 - DNA, 22 bp, Homo Sapiens
caagcccctcaccctgagatgg

SEQ ID NO: 8654 - DNA, 22 bp, Homo Sapiens
aagcccctcaccctgagatggg

SEQ ID NO: 8655 - DNA, 22 bp, Homo Sapiens
agcccctcaccctgagatggga

SEQ ID NO: 8656 - DNA, 22 bp, Homo Sapiens
gcccctcaccctgagatgggag

SEQ ID NO: 8657 - DNA, 22 bp, Homo Sapiens
cccctcaccctgagatgggagc

SEQ ID NO: 8658 - DNA, 22 bp, Homo Sapiens
ccctcaccctgagatgggagcc

SEQ ID NO: 8659 - DNA, 22 bp, Homo Sapiens
cctcaccctgagatgggagccg

SEQ ID NO: 8660 - DNA, 22 bp, Homo Sapiens
ctcaccctgagatgggagccgt

SEQ ID NO: 8661 - DNA, 22 bp, Homo Sapiens
tcaccctgagatgggagccgtc

SEQ ID NO: 8662 - DNA, 22 bp, Homo Sapiens
caccctgagatgggagccgtct

SEQ ID NO: 8663 - DNA, 22 bp, Homo Sapiens
ccctgagatgggagccgtcttc

SEQ ID NO: 8664 - DNA, 22 bp, Homo Sapiens
cctgagatgggagccgtcttcc

SEQ ID NO: 8665 - DNA, 22 bp, Homo Sapiens
ctgagatgggagccgtcttccc

SEQ ID NO: 8666 - DNA, 22 bp, Homo Sapiens
gagatgggagccgtcttcccag

SEQ ID NO: 8667 - DNA, 22 bp, Homo Sapiens
agatgggagccgtcttcccagc

SEQ ID NO: 8668 - DNA, 22 bp, Homo Sapiens
gatgggagccgtcttcccagcc

SEQ ID NO: 8669 - DNA, 22 bp, Homo Sapiens
atgggagccgtcttcccagccc

SEQ ID NO: 8670 - DNA, 22 bp, Homo Sapiens
tgggagccgtcttcccagccca

SEQ ID NO: 8671 - DNA, 22 bp, Homo Sapiens
gggagccgtcttcccagcccac

SEQ ID NO: 8672 - DNA, 22 bp, Homo Sapiens
ggagccgtcttcccagcccacc

SEQ ID NO: 8673 - DNA, 22 bp, Homo Sapiens
gagccgtcttcccagcccacca

SEQ ID NO: 8674 - DNA, 22 bp, Homo Sapiens
agccgtcttcccagcccaccat

SEQ ID NO: 8675 - DNA, 22 bp, Homo Sapiens
gccgtcttcccagcccaccatc

SEQ ID NO: 8676 - DNA, 22 bp, Homo Sapiens
ccgtcttcccagcccaccatcc

SEQ ID NO: 8677 - DNA, 22 bp, Homo Sapiens
cgtcttcccagcccaccatccc

SEQ ID NO: 8678 - DNA, 22 bp, Homo Sapiens
gtcttcccagcccaccatcccc

SEQ ID NO: 8679 - DNA, 22 bp, Homo Sapiens
tcttcccagcccaccatcccca

SEQ ID NO: 8680 - DNA, 22 bp, Homo Sapiens
cttcccagcccaccatccccat

SEQ ID NO: 8681 - DNA, 22 bp, Homo Sapiens
ttcccagcccaccatccccatc

SEQ ID NO: 8682 - DNA, 22 bp, Homo Sapiens
tcccagcccaccatccccatcg

SEQ ID NO: 8683 - DNA, 22 bp, Homo Sapiens
cccagcccaccatccccatcgt

SEQ ID NO: 8684 - DNA, 22 bp, Homo Sapiens
ccagcccaccatccccatcgtg

SEQ ID NO: 8685 - DNA, 22 bp, Homo Sapiens
cagcccaccatccccatcgtgg

SEQ ID NO: 8686 - DNA, 22 bp, Homo Sapiens
agcccaccatccccatcgtggg

SEQ ID NO: 8687 - DNA, 22 bp, Homo Sapiens
gcccaccatccccatcgtgggc

SEQ ID NO: 8688 - DNA, 22 bp, Homo Sapiens
cccaccatccccatcgtgggca

SEQ ID NO: 8689 - DNA, 22 bp, Homo Sapiens
ccaccatccccatcgtgggcat

SEQ ID NO: 8690 - DNA, 22 bp, Homo Sapiens
caccatccccatcgtgggcatc

SEQ ID NO: 8691 - DNA, 22 bp, Homo Sapiens
cgtgggcatcattgctggcctg

SEQ ID NO: 8692 - DNA, 22 bp, Homo Sapiens
gtgggcatcattgctggcctgg

SEQ ID NO: 8693 - DNA, 22 bp, Homo Sapiens
tcactggagctgtggtcgctgc

SEQ ID NO: 8694 - DNA, 22 bp, Homo Sapiens
cactggagctgtggtcgctgct

SEQ ID NO: 8695 - DNA, 22 bp, Homo Sapiens
actggagctgtggtcgctgctg

SEQ ID NO: 8696 - DNA, 22 bp, Homo Sapiens
ctggagctgtggtcgctgctgt

SEQ ID NO: 8697 - DNA, 22 bp, Homo Sapiens
tggagctgtggtcgctgctgtg

SEQ ID NO: 8698 - DNA, 22 bp, Homo Sapiens
ggagctgtggtcgctgctgtga

SEQ ID NO: 8699 - DNA, 22 bp, Homo Sapiens
ggtcgctgctgtgatgtggagg

SEQ ID NO: 8700 - DNA, 22 bp, Homo Sapiens
cgctgctgtgatgtggaggagg

SEQ ID NO: 8701 - DNA, 22 bp, Homo Sapiens
ggagggagctactctcaggctg

SEQ ID NO: 8702 - DNA, 22 bp, Homo Sapiens
gagggagctactctcaggctgc

SEQ ID NO: 8703 - DNA, 22 bp, Homo Sapiens
ggctgcaagcagtgacagtgcc

SEQ ID NO: 8704 - DNA, 22 bp, Homo Sapiens
gctgcaagcagtgacagtgccc

SEQ ID NO: 8705 - DNA, 22 bp, Homo Sapiens
gcaagcagtgacagtgcccagg

SEQ ID NO: 8706 - DNA, 22 bp, Homo Sapiens
caagcagtgacagtgcccaggg

SEQ ID NO: 8707 - DNA, 22 bp, Homo Sapiens
aagcagtgacagtgcccagggc

SEQ ID NO: 8708 - DNA, 22 bp, Homo Sapiens
agcagtgacagtgcccagggct

SEQ ID NO: 8709 - DNA, 22 bp, Homo Sapiens
gcagtgacagtgcccagggctc

SEQ ID NO: 8710 - DNA, 22 bp, Homo Sapiens
cagtgacagtgcccagggctct

SEQ ID NO: 8711 - DNA, 22 bp, Homo Sapiens
agtgacagtgcccagggctctg

SEQ ID NO: 8712 - DNA, 22 bp, Homo Sapiens
gtgacagtgcccagggctctga

SEQ ID NO: 8713 - DNA, 22 bp, Homo Sapiens
gacagtgcccagggctctgatg

SEQ ID NO: 8714 - DNA, 22 bp, Homo Sapiens
cagtgcccagggctctgatgtg

SEQ ID NO: 8715 - DNA, 22 bp, Homo Sapiens
gtgcccagggctctgatgtgtc

SEQ ID NO: 8716 - DNA, 22 bp, Homo Sapiens
gcccagggctctgatgtgtctc

SEQ ID NO: 8717 - DNA, 22 bp, Homo Sapiens
gccttgtgtgggactgagaggc

SEQ ID NO: 8718 - DNA, 22 bp, Homo Sapiens
tgtgaggaggtggggagaccac

SEQ ID NO: 8719 - DNA, 22 bp, Homo Sapiens
gtgaggaggtggggagaccacc

SEQ ID NO: 8720 - DNA, 22 bp, Homo Sapiens
tgaggaggtggggagaccaccc

SEQ ID NO: 8721 - DNA, 22 bp, Homo Sapiens
gaggaggtggggagaccacccc

SEQ ID NO: 8722 - DNA, 22 bp, Homo Sapiens
aggaggtggggagaccacccca

SEQ ID NO: 8723 - DNA, 22 bp, Homo Sapiens
ggaggtggggagaccaccccac

SEQ ID NO: 8724 - DNA, 22 bp, Homo Sapiens
gaggtggggagaccaccccacc

SEQ ID NO: 8725 - DNA, 22 bp, Homo Sapiens
aggtggggagaccaccccaccc

SEQ ID NO: 8726 - DNA, 22 bp, Homo Sapiens
ggtggggagaccaccccacccc

SEQ ID NO: 8727 - DNA, 22 bp, Homo Sapiens
gtggggagaccaccccaccccc

SEQ ID NO: 8728 - DNA, 22 bp, Homo Sapiens
tggggagaccaccccaccccca

SEQ ID NO: 8729 - DNA, 22 bp, Homo Sapiens
ggggagaccaccccacccccat

SEQ ID NO: 8730 - DNA, 22 bp, Homo Sapiens
gggagaccaccccacccccatg

SEQ ID NO: 8731 - DNA, 22 bp, Homo Sapiens
ggagaccaccccacccccatgt

SEQ ID NO: 8732 - DNA, 22 bp, Homo Sapiens
gagaccaccccacccccatgtc

SEQ ID NO: 8733 - DNA, 22 bp, Homo Sapiens
agaccaccccacccccatgtcc

SEQ ID NO: 8734 - DNA, 22 bp, Homo Sapiens
gaccaccccacccccatgtcca

SEQ ID NO: 8735 - DNA, 22 bp, Homo Sapiens
accaccccacccccatgtccac

SEQ ID NO: 8736 - DNA, 22 bp, Homo Sapiens
ccaccccacccccatgtccacc

SEQ ID NO: 8737 - DNA, 22 bp, Homo Sapiens
caccccacccccatgtccacca

SEQ ID NO: 8738 - DNA, 22 bp, Homo Sapiens
accccacccccatgtccaccat

SEQ ID NO: 8739 - DNA, 22 bp, Homo Sapiens
ccccacccccatgtccaccatg

SEQ ID NO: 8740 - DNA, 22 bp, Homo Sapiens
cccacccccatgtccaccatga

SEQ ID NO: 8741 - DNA, 22 bp, Homo Sapiens
ccacccccatgtccaccatgac

SEQ ID NO: 8742 - DNA, 22 bp, Homo Sapiens
cacccccatgtccaccatgacc

SEQ ID NO: 8743 - DNA, 22 bp, Homo Sapiens
acccccatgtccaccatgaccc

SEQ ID NO: 8744 - DNA, 22 bp, Homo Sapiens
cccccatgtccaccatgaccct

SEQ ID NO: 8745 - DNA, 22 bp, Homo Sapiens
ccccatgtccaccatgaccctc

SEQ ID NO: 8746 - DNA, 22 bp, Homo Sapiens
ccaccatgaccctcttcccacg

SEQ ID NO: 8747 - DNA, 22 bp, Homo Sapiens
caccatgaccctcttcccacgc

SEQ ID NO: 8748 - DNA, 22 bp, Homo Sapiens
ccatgaccctcttcccacgctg

SEQ ID NO: 8749 - DNA, 22 bp, Homo Sapiens
tgaccctcttcccacgctgacc

SEQ ID NO: 8750 - DNA, 22 bp, Homo Sapiens
gaccctcttcccacgctgacct

SEQ ID NO: 8751 - DNA, 22 bp, Homo Sapiens
accctcttcccacgctgacctg

SEQ ID NO: 8752 - DNA, 22 bp, Homo Sapiens
ccctcttcccacgctgacctgt

SEQ ID NO: 8753 - DNA, 22 bp, Homo Sapiens
cctcttcccacgctgacctgtg

SEQ ID NO: 8754 - DNA, 22 bp, Homo Sapiens
ctcttcccacgctgacctgtgc

SEQ ID NO: 8755 - DNA, 22 bp, Homo Sapiens
cttcccacgctgacctgtgctc

SEQ ID NO: 8756 - DNA, 22 bp, Homo Sapiens
ttcccacgctgacctgtgctcc

SEQ ID NO: 8757 - DNA, 22 bp, Homo Sapiens
tcccacgctgacctgtgctccc

SEQ ID NO: 8758 - DNA, 22 bp, Homo Sapiens
cccacgctgacctgtgctccct

SEQ ID NO: 8759 - DNA, 22 bp, Homo Sapiens
ccacgctgacctgtgctccctc

SEQ ID NO: 8760 - DNA, 22 bp, Homo Sapiens
cacgctgacctgtgctccctcc

SEQ ID NO: 8761 - DNA, 22 bp, Homo Sapiens
acgctgacctgtgctccctccc

SEQ ID NO: 8762 - DNA, 22 bp, Homo Sapiens
cgctgacctgtgctccctcccc

SEQ ID NO: 8763 - DNA, 22 bp, Homo Sapiens
gctgacctgtgctccctcccca

SEQ ID NO: 8764 - DNA, 22 bp, Homo Sapiens
ctgacctgtgctccctccccaa

SEQ ID NO: 8765 - DNA, 22 bp, Homo Sapiens
gacctgtgctccctccccaatc

SEQ ID NO: 8766 - DNA, 22 bp, Homo Sapiens
tcctgttccagagaggtggggc

SEQ ID NO: 8767 - DNA, 22 bp, Homo Sapiens
cctgttccagagaggtggggct

SEQ ID NO: 8768 - DNA, 22 bp, Homo Sapiens
ctgttccagagaggtggggctg

SEQ ID NO: 8769 - DNA, 22 bp, Homo Sapiens
gttccagagaggtggggctgag

SEQ ID NO: 8770 - DNA, 22 bp, Homo Sapiens
ttccagagaggtggggctgagg

SEQ ID NO: 8771 - DNA, 22 bp, Homo Sapiens
tccagagaggtggggctgaggt

SEQ ID NO: 8772 - DNA, 22 bp, Homo Sapiens
ccagagaggtggggctgaggtg

SEQ ID NO: 8773 - DNA, 22 bp, Homo Sapiens
cagagaggtggggctgaggtgt

SEQ ID NO: 8774 - DNA, 22 bp, Homo Sapiens
agagaggtggggctgaggtgtc

SEQ ID NO: 8775 - DNA, 22 bp, Homo Sapiens
gagaggtggggctgaggtgtct

SEQ ID NO: 8776 - DNA, 22 bp, Homo Sapiens
agaggtggggctgaggtgtctc

SEQ ID NO: 8777 - DNA, 22 bp, Homo Sapiens
gaggtggggctgaggtgtctcc

SEQ ID NO: 8778 - DNA, 22 bp, Homo Sapiens
aggtggggctgaggtgtctcca

SEQ ID NO: 8779 - DNA, 22 bp, Homo Sapiens
ggtggggctgaggtgtctccat

SEQ ID NO: 8780 - DNA, 22 bp, Homo Sapiens
gtggggctgaggtgtctccatc

SEQ ID NO: 8781 - DNA, 22 bp, Homo Sapiens
ggggctgaggtgtctccatctc

SEQ ID NO: 8782 - DNA, 18 bp, Homo Sapiens
agaagcagaggggtcagg

SEQ ID NO: 8783 - DNA, 18 bp, Homo Sapiens
gaagcagaggggtcaggg

SEQ ID NO: 8784 - DNA, 18 bp, Homo Sapiens
gcggtgtatggattgggg

SEQ ID NO: 8785 - DNA, 18 bp, Homo Sapiens
tggattggggagtcccag

SEQ ID NO: 8786 - DNA, 18 bp, Homo Sapiens
ggattggggagtcccagc

SEQ ID NO: 8787 - DNA, 18 bp, Homo Sapiens
gattggggagtcccagcc

SEQ ID NO: 8788 - DNA, 18 bp, Homo Sapiens
tggggagtcccagccttg

SEQ ID NO: 8789 - DNA, 18 bp, Homo Sapiens
ggggagtcccagccttgg

SEQ ID NO: 8790 - DNA, 18 bp, Homo Sapiens
gggagtcccagccttggg

SEQ ID NO: 8791 - DNA, 18 bp, Homo Sapiens
ggagtcccagccttgggg

SEQ ID NO: 8792 - DNA, 18 bp, Homo Sapiens
gagtcccagccttgggga

SEQ ID NO: 8793 - DNA, 18 bp, Homo Sapiens
agtcccagccttggggat

SEQ ID NO: 8794 - DNA, 18 bp, Homo Sapiens
gtcccagccttggggatt

SEQ ID NO: 8795 - DNA, 3217 bp, Homo Sapiens
atggccgtcatggcgccccgaaccctcgtcctgctactctcgggggctctggccctgacccagacctgggcgggtgagtgcggggtcgggagggaaacggcctctgtggggagaagcaacgggcccgcctggcgggggcgcaggacccgggaagccgcgccgggaggagggtcgggcgggtctcagccactcctcgtccccaggctctcactccatgaggtatttcttcacatccgtgtcccggcccggccgcggggagccccgcttcatcgcagtgggctacgtggacgacacgcagttcgtgcggttcgacagcgacgccgcgagccagaggatggagccgcgggcgccgtggatagagcaggagggtccggagtattgggacggggagacacggaaagtgaaggcccactcacagactcaccgagtggacctggggaccctgcgcggctactacaaccagagcgaggccggtgagtgaccccggcccggggcgcaggtcacgacctctcatcccccacggacgggccaggtcgcccacagtctccgggtccgagatccgccccgaagccgcgggaccccgagacccttgccccgggagaggcccaggcgcctttacccggtttcattttcagtttaggccaaaaatccccccaggttggtcggggcggggcggggctcgggggaccgggctgaccgcggggtccgggccaggttctcacaccgtccagaggatgtatggctgcgacgtggggtcggactggcgcttcctccgcgggtaccaccagtacgcctacgacggcaaggattacatcgccctgaaagaggacctgcgctctttgaccgcggcggacatggcagctcagaccaccaagcacaagtgggaggcggcccatgtggcggagcagttgagagcctacctggagggcacgtgcgtggagtggctccgcagatacctggagaacgggaaggagacgctgcagcgcacgggtaccaggggccacggggcgcctccctgatcgcctgtagatctcccgggctggcctcccacaaggaggggagacaattgggaccaacactagaatatcgccctccctctggtcctgagggagaggaatcctcctgggtttccagatcctgtaccagagagtgactctgaggttccgccctgctctctgacacaattaagggataaaatctctgaaggaatgacgggaagacgatccctcgaatactgatgagtggttccctttgacacacacaggcagcagccttgggcccgtgacttttcctctcaggccttgttctctgcttcacactcaatgtgtgtgggggtctgagtccagcacttctgagtccttcagcctccactcaggtcaggaccagaagtcgctgttccctcttcagggactagaattttccacggaataggagattatcccaggtgcctgtgtccaggctggtgtctgggttctgtgctcccttccccatcccaggtgtcctgtccattctcaagatagccacatgtgtgctggaggagtgtcccatgacagatgcaaaatgcctgaatgatctgactcttcctgacagacgcccccaaaacgcatatgactcaccacgctgtctctgaccatgaagccaccctgaggtgctgggccctgagcttctaccctgcggagatcacactgacctggcagcgggatggggaggaccagacccaggacacggagctcgtggagaccaggcctgcaggggatggaaccttccagaagtgggcggctgtggtggtgccttctggacaggagcagagatacacctgccatgtgcagcatgagggtttgcccaagcccctcaccctgagatggggtaaggagggagacgggggtgtcatgtcttttagggaaagcaggagcctctctgacctttagcagggtcagggcccctcaccttcccctcttttcccagagccgtcttcccagcccaccatccccatcgtgggcatcattgctggcctggttctctttggagctgtgatcactggagctgtggtcgctgctgtgatgtggaggaggaagagctcaggtggggaaggggtgaagggtgggtctgagatttcttgtctcactgagggttccaagacccaggtagaagtgtgccctgcctcgttactgggaagcaccacccacaattatgggcctacccagcctgggccctgtgtgccagcacttactcttttgtaaagcacctgttaaaatgaaggacagatttatcaccttgattacagcggtgatgggacctgatcccagcagtcacaagtcacaggggaaggtccctgaggaccttcaggagggcggttggtccaggacccacacctgctttcttcatgtttcctgatcccgccctgggtctgcagtcacacatttctggaaacttctctgaggtccaagacttggaggttcctctaggaccttaaggccctgactcctttctggtatctcacaggacattttcttcccacagatagaaaaggagggagctactctcaggctgcaagtaagtatgaaggaggctgatgcctgaggtccttgggatattgtgtttgggagcccatgggggagctcacccaccccacaattcctcctctagccacatcttctgtgggatctgaccaggttctgtttttgttctaccccaggcagtgacagtgcccagggctctgatgtgtctctcacagcttgtaaaggtgagagcctggagggcctgatgtgtgttgggtgttgggcggaacagtggacacagctgtgctatggggtttctttccattggatgtattgagcatgcgatgggctgtttaaagtgtgacccctcactgtgacagatacgaatttgttcatgaatatttttttctatagtgtgagacagctgccttgtgtgggactgagaggcaagagttgttcctgcccttccctttgtgacttgaagaaccctgactttgtttctgcaaaggcacctgcatgtgtctgtgttcgtgtaggcataatgtgaggaggtggggagaccaccccacccccatgtccaccatgaccctcttcccacgctgacctgtgctccctccccaatcatctttcctgttccagagaggtggggctgaggtgtctccatctctgtctcaacttcatggtgcactgagctgtaacttcttccttccctattaaaa

SEQ ID NO: 8796 - DNA, 2917 bp, Homo Sapiens
atggccgtcatggcgccccgaaccctcgtcctgctactctcgggggctctggccctgacccacacctgggcgggtgagtgcggggtcgggagggaaacggcctctgtggggagaagcaacgggcccgcctggcgggggcgcaggacccgggaagccgcgccgggaggagggtcgggcgggtctcagccactcctcgtccccaggctctcactccatgaggtatttcttcacatccgtgtcccggcccggccgcggggagccccgcttcatcgcagtgggctacgtggacgacacgcagttcgtgcggttcgacagcgacgccgcgagccagaggatggagccgcgggcgccgtggatagagcaggagggtccggagtattgggacggggagacacggaaagtgaaggcccactcacagactcaccgagtggacctggggaccctgcgcggctactacaaccagagcgaggccggtgagtgaccccggcccggggcgcaggtcacgacctctcatcccccacggacgggccaggtcgcccacagtctccgggtccgagatccgccccgaagccgcgggaccccgagacccttgccccgggagaggcccaggcgcctttacccggtttcattttcagtttaggccaaaaatccccccaggttggtcggggcggggcggggctcgggggaccgggctgaccgcggggtccgggccaggttctcacaccgtccagaggatgtatggctgcgacgtggggtcggactggcgcttcctccgcgggtaccaccagtacgcctacgacggcaaggattacatcgccctgaaagaggacctgcgctcttggaccgcggcggacatggcagctcagaccaccaagcacaagtgggaggcggcccatgtggcggagcagttgagagcctacctggagggcacgtgcgtggagtggctccgcagatacctggagaacgggaaggagacgctgcagcgcacgggtaccaggggccacggggcgcctccctgatcgcctgtagatctcccgggctggcctcccacaaggaggggagacaattgggaccaacactagaatatcgccctccctctggtcctgagggagaggaatcctcctgggtttccagatcctgtaccagagagtgactctgaggttccgccctgctctctgacacaattaagggataaaatctctgaaggaatgacgggaagacgatccctcgaatactgatgagtggttccctttgacacacacaggcagcagccttgggcccgtgacttttcctctcaggccttgttctctgcttcacactcaatgtgtgtgggggtctgagtccagcacttctgagtccttcagcctccactcaggtcaggaccagaagtcgctgttccctcttcagggactagaattttccacggaataggagattatcccaggtgcctgtgtccaggctggtgtctgggttctgtgctcccttccccatcccaggtgtcctgtccattctcaagatagccacatgtgtgctggaggagtgtcccatgacagatgcaaaatgcctgaatgatctgactcttcctgacagacgcccccaaaacgcatatgactcaccacgctgtctctgaccatgaagccaccctgaggtgctgggccctgagcttctaccctgcggagatcacactgacctggcagcgggatggggaggaccagacccaggacacggagctcgtggagaccaggcctgcaggggatggaaccttccagaagtgggcggctgtggtggtgccttctggacaggagcagagatacacctgccatgtgcagcatgagggtttgcccaagcccctcaccctgagatggggtaaggagggagacgggggtgtcatgtcttttagggaaagcaggagcctctctgacctttagcagggtcagggcccctcaccttcccctcttttcccagagccgtcttcccagcccaccatccccatcgtgggcatcattgctggcctggttctctttggagctgtgatcactggagctgtggtcgctgctgtgatgtggaggaggaagagctcaggtggggaaggggtgaagggtgggtctgagatttcttgtctcactgagggttccaagacccaggtagaagtgtgccctgcctcgttactgggaagcaccacccacaattatgggcctacccagcctgggccctgtgtgccagcacttactcttttgtaaagcacctgttaaaatgaaggacagatttatcaccttgattacagcggtgatgggacctgatcccagcagtcacaagtcacaggggaaggtccctgaggaccttcaggagggcggttggtccaggacccacacctgctttcttcatgtttcctgatcccgccctgggtctgcagtcacacatttctggaaacttctctgaggtccaagacttggaggttcctctaggaccttaaggccctgactcctttctggtatctcacaggacattttcttcccacagatagaaaaggagggagctactctcaggctgcaagtaagtatgaaggaggctgatgcctgaggtccttgggatattgtgtttgggagcccatgggggagctcacccaccccacaattcctcctctagccacatcttctgtgggatctgaccaggttctgtttttgttctaccccaggcagtgacagtgcccagggctctgatgtgtctctcacagcttgtaaaggtgagagcctggagggcctgatgtgtgttgggtgttgggcggaacagtggacacagctgtgctatggggtttctttccattggatgtattgagcatgcgatgggctgtttaaagtgtgacccctcactgtgacagatacgaatttgttcatgaatatttttttctatagtgtga

SEQ ID NO: 8797 - DNA, 3314 bp, Homo Sapiens
cagaagcagaggggtcagggcgaagtcccagggccccaggcgtggctctcagggtctcaggccccgaaggcggtgtatggattggggagtcccagccttggggattccccaactccgcagtttcttttctccctctcccaacctatgtagggtccttcttcctggatactcacgacgcggacccagttctcactcccattgggtgtcgggtttccagagaagccaatcagtgtcgtcgcggtcgcggttctaaagtccgcacgcacccaccgggactcagattctccccagacgccgaggatggccgtcatggcgccccgaaccctcgtcctgctactctcgggggctctggccctgacccagacctgggcgggtgagtgcggggtcgggagggaaacggcctctgtggggagaagcaacgggcccgcctggcgggggcgcaggacccgggaagccgcgccgggaggagggtcgggcgggtctcagccactcctcgtccccaggctctcactccatgaggtatttcttcacatccgtgtcccggcccggccgcggggagccccgcttcatcgcagtgggctacgtggacgacacgcagttcgtgcggttcgacagcgacgccgcgagccagaggatggagccgcgggcgccgtggatagagcaggagggtccggagtattgggacggggagacacggaaagtgaaggcccactcacagactcaccgagtggacctggggaccctgcgcggctactacaaccagagcgaggccggtgagtgaccccggcccggggcgcaggtcacgacctctcatcccccacggacgggccaggtcgcccacagtctccgggtccgagatccgccccgaagccgcgggaccccgagacccttgccccgggagaggcccaggcgcctttacccggtttcattttcagtttaggccaaaaatccccccaggttggtcggggcggggcggggctcgggggaccgggctgaccgcggggtccgggccaggttctcacaccgtccagaggatgtatggctgcgacgtggggtcggactggcgcttcctccgcgggtaccaccagtacgcctacgacggcaaggattacatcgccctgaaagaggacctgcgctcttggaccgcggcggacatggcagctcagaccaccaagcacaagtgggaggcggcccatgtggcggagcagttgagagcctacctggagggcacgtgcgtggagtggctccgcagatacctggagaacgggaaggagacgctgcagcgcacgggtaccaggggccacggggcgcctccctgatcgcctgtagatctcccgggctggcctcccacaaggaggggagacaattgggaccaacactagaatatcgccctccctctggtcctgagggagaggaatcctcctgggtttccagatcctgtaccagagagtgactctgaggttccgccctgctctctgacacaattaagggataaaatctctgaaggaatgacgggaagacgatccctcgaatactgatgagtggttccctttgacacacacaggcagcagccttgggcccgtgacttttcctctcaggccttgttctctgcttcacactcaatgtgtgtgggggtctgagtccagcacttctgagtccttcagcctccactcaggtcaggaccagaagtcgctgttccctcttcagggactagaattttccacggaataggagattatcccaggtgcctgtgtccaggctggtgtctgggttctgtgctcccttccccatcccaggtgtcctgtccattctcaagatagccacatgtgtgctggaggagtgtcccatgacagatgcaaaatgcctgaatgatctgactcttcctgacagacgcccccaaaacgcatatgactcaccacgccgtctctgaccatgaagccaccctgaggtgctgggccctgagcttctaccctgcggagatcacactgacctggcagcgggatggggaggaccagacccaggacacggagctcgtggagaccaggcctgcaggggatggaaccttccagaagtgggcggctgtggtggtgccttctggacaggagcagagatacacctgccatgtgcagcatgagggtttgcccaagcccctcaccctgagatggggtaaggagggagacgggggtgtcatgtcttttagggaaagcaggagcctctctgacctttagcagggtcagggcccctcaccttcccctcttttcccagagccgtcttcccagcccaccatccccatcgtgggcatcattgctggcctggttctctttggagctgtgatcactggagctgtggtcgctgctgtgatgtggaggaggaagagctcaggtggggaaggggtgaagggtgggtctgagatttcttgtctcactgagggttccaagacccaggtagaagtgtgccctgcctcgttactgggaagcaccacccacaattatgggcctacccagcctgggccctgtgtgccagcacttactcttttgtaaagcacctgttaaaatgaaggacagatttatcaccttgattacagcggtgatgggacctgatcccagcagtcacaagtcacaggggaaggtccctgaggaccttcaggagggcggttggtccaggacccacacctgctttcttcatgtttcctgatcccgccctgggtctgcagtcacacatttctggaaacttctctgaggtccaagacttggaggttcctctaggaccttaaggccctgactcctttctggtatctcacaggacattttcttcccacagatagaaaaggagggagctactctcaggctgcaagtaagtatgaaggaggctgatgcctgaggtccttgggatattgtgtttgggagcccatgggggagctcacccaccccacaattcctcctctagccacatcttctgtgggatctgaccaggttctgtttttgttctaccccaggcagtgacagtgcccagggctctgatgtgtctctcacagcttgtaaaggtgagagcctggagggcctgatgtgtgttgggtgttgggcggaacagtggacacagctgtgctatggggtttctttccattggatgtattgagcatgcgatgggctgtttaaagtgtgacccctcactgtgacagatacgaatttgttcatgaatatttttttctatagtgtgagacagctgccttgtgtgggactgagaggcaagagttgttcctgcccttccctttgtgacttgaagaaccctgactttgtttctgcaaaggcacctgc

SEQ ID NO: 8798 - DNA, 3407 bp, Homo Sapiens
tgagacagagcgcttggcacagaagcagaggggtcagggcgaagtcccagggccccaggcgtggctctcagggtctcaggccccgaaggcggtgtatggattggggagtcccagccttggggattccccaactccgcagtttcttttctccctctcccaacctatgtagggtccttcttcctggatactcacgacgcggacccagttctcactcccattgggtgtcgggtttccagagaagccaatcagtgtcgtcgcggtcgcggttctaaagtccgcacgcacccaccgggactcagattctccccagacgccgaggatggccgtcatggcgccccgaaccctcgtcctgctactctcgggggctctggccctgacccagacctgggcgggtgagtgcggggtcgggagggaaacggcctctgtggggagaagcaacgggcccgcctggcgggggcgcaggacccgggaagccgcgccgggaggagggtcgggcgggtctcagccactcctcgtccccaggctctcactccatgaggtatttcttcacatccgtgtcccggcccggccgcggggagccccgcttcatcgcagtgggctacgtggacgacacgcagttcgtgcggttcgacagcgacgccgcgagccagaggatggagccgcgggcgccgtggatagagcaggagggtccggagtattgggacggggagacacggaaagtgaaggcccactcacagactcaccgagtggacctggggaccctgcgcggctactacaaccagagcgaggccggtgagtgaccccggcccggggcgcaggtcacgacctctcatcccccacggacgggccaggtcgcccacagtctccgggtccgagatccgccccgaagccgcgggaccccgagacccttgccccgggagaggcccaggcgcctttacccggtttcattttcagtttaggccaaaaatccccccaggttggtcggggcggggcggggctcgggggaccgggctgaccgcggggtccgggccaggttctcacaccgtccagaggatgtatggctgcgacgtggggtcggactggcgcttcctccgcgggtaccaccagtacgcctacgacggcaaggattacatcgccctgaaagaggacctgcgctcttggaccgcggcggacatggcagctcagaccaccaagcacaagtgggaggcggcccatgtggcggagcagttgagagcctacctggagggcacgtgcgtggagtggctccgcagatacctggagaacgggaaggagacgctgcagcgcacgggtaccaggggccacggggcgcctccctgatcgcctgtagatctcccgggctggcctcccacaaggaggggagacaattgggaccaacactagaatatcgccctccctctggtcctgagggagaggaatcctcctgggtttccagatcctgtaccagagagtgactctgaggttccgccctgctctctgacacaattaagggataaaatctctgaaggaatgacgggaagacgatccctcgaatactgatgagtggttccctttgacacacacaggcagcagccttgggcccgtgacttttcctctcaggccttgttctctgcttcacactcaatgtgtgtgggggtctgagtccagcacttctgagtccttcagcctccactcaggtcaggaccagaagtcgctgttccctcttcagggactagaattttccacggaataggagattatcccaggtgcctgtgtccaggctggtgtctgggttctgtgctcccttccccatcccaggtgtcctgtccattctcaagatagccacatgtgtgctggaggagtgtcccatgacagatgcaaaatgcctgaatgatctgactcttcctgacagacgcccccaaaacgcatatgactcaccacgctgtctctgaccatgaagccaccctgaggtgctgggccctgagcttctaccctgcggagatcacactgacctggcagcgggatggggaggaccagacccaggacacggagctcgtggagaccaggcctgcaggggatggaaccttccagaagtgggcggctgtggtggtgccttctggacaggagcagagatacacctgccatgtgcagcatgagggtttgcccaagcccctcaccctgagatggggtaaggagggagacgggggtgtcatgtcttttagggaaagcaggagcctctctgacctttagcagggtcagggcccctcaccttcccctcttttcccagagccgtcttcccagcccaccatccccatcgtgggcatcattgctggcctggttctctttggagctgtgatcactggagctgtggtcgctgctgtgatgtggaggaggaagagctcaggtggggaaggggtgaagggtgggtctgagatttcttgtctcactgagggttccaagacccaggtagaagtgtgccctgcctcgttactgggaagcaccacccacaattatgggcctacccagcctgggccctgtgtgccagcacttactcttttgtaaagcacctgttaaaatgaaggacagatttatcaccttgattacagcggtgatgggacctgatcccagcagtcacaagtcacaggggaaggtccctgaggaccttcaggagggcggttggtccaggacccacacctgctttcttcatgtttcctgatcccgccctgggtctgcagtcacacatttctggaaacttctctgaggtccaagacttggaggttcctctaggaccttaaggccctgactcctttctggtatctcacaggacattttcttcccacagatagaaaaggagggagctactctcaggctgcaagtaagtatgaaggaggctgatgcctgaggtccttgggatattgtgtttgggagcccatgggggagctcacccaccccacaattcctcctctagccacatcttctgtgggatctgaccaggttctgtttttgttctaccccaggcagtgacagtgcccagggctctgatgtgtctctcacagcttgtaaaggtgagagcctggagggcctgatgtgtgttgggtgttgggcggaacagtggacacagctgtgctatggggtttctttccattggatgtattgagcatgcgatgggctgtttaaagtgtgacccctcactgtgacagatacgaatttgttcatgaatatttttttctatagtgtgagacagctgccttgtgtgggactgagaggcaagagttgttcctgcccttccctttgtgacttgaagaaccctgactttgtttctgcaaaggcacctgcatgtgtctgtgttcgtgtaggcataatgtgaggaggtggggagaccaccccacccccatgtccaccatgaccct

SEQ ID NO: 8799 - DNA, 1698 bp, Homo Sapiens
cagaagcagaggggtcagggcgaagtcccagggccccaggcgtggctctcagggtctcaggccccgaaggcggtgtatggattggggagtcccagccttggggattccccaactccgcagtttcttttctccctctcccaacctatgtagggtccttcttcctggatactcacgacgcggacccagttctcactcccattgggtgtcgggtttccagagaagccaatcagtgtcgtcgcggtcgcggttctaaagtccgcacgcacccaccgggactcagattctccccagacgccgaggatggccgtcatggcgccccgaaccctcgtcctgctactctcgggggctctggccctgacccagacctgggcgggctctcactccatgaggtatttcttcacatccgtgtcccggcccggccgcggggagccccgcttcatcgcagtgggctacgtggacgacacgcagttcgtgcggttcgacagcgacgccgcgagccagaggatggagccgcgggcgccgtggatagagcaggagggtccggagtattgggacggggagacacggaaagtgaaggcccactcacagactcaccgagtggacctggggaccctgcgcggctactacaaccagagcgaggccggttctcacaccgtccagaggatgtatggctgcgacgtggggtcggactggcgcttcctccgcgggtaccaccagtacgcctacgacggcaaggattacatcgccctgaaagaggacctgcgctcttggaccgcggcggacatggcagctcagaccaccaagcacaagtgggaggcggcccatgtggcggagcagttgagagcctacctggagggcacgtgcgtggagtggctccgcagatacctggagaacgggaaggagacgctgcagcgcacggacgcccccaaaacgcatatgactcaccacgctgtctctgaccatgaagccaccctgaggtgctgggccctgagcttctaccctgcggagatcacactgacctggcagcgggatggggaggaccagacccaggacacggagctcgtggagaccaggcctgcaggggatggaaccttccagaagtgggcggctgtggtggtgccttctggacaggagcagagatacacctgccatgtgcagcatgagggtttgcccaagcccctcaccctgagatgggagccgtcttcccagcccaccatccccatcgtgggcatcattgctggcctggttctctttggagctgtgatcactggagctgtggtcgctgctgtgatgtggaggaggaagagctcagatagaaaaggagggagctactctcaggctgcaagcagtgacagtgcccagggctctgatgtgtctctcacagcttgtaaagtgtgagacagctgccttgtgtgggactgagaggcaagagttgttcctgcccttccctttgtgacttgaagaaccctgactttgtttctgcaaaggcacctgcatgtgtctgtgttcgtgtaggcataatgtgaggaggtggggagaccaccccacccccatgtccaccatgaccctcttcccacgctgacctgtgctccctccccaatcatctttcctgttccagagaggtggggctgaggtgtctccatctctgtctcaacttcatggtgcactgagctgtaacttcttccttccctattaaaa

SEQ ID NO: 8800 - RNA, 4 nt, Artificial Sequence
  shRNA loop sequence
cgaa

SEQ ID NO: 8801 - RNA, 7 nt, Artificial Sequence
  shRNA loop sequence
uucaaga

SEQ ID NO: 8802 - RNA, 7 nt, Artificial Sequence
  shRNA loop sequence
auauuca

SEQ ID NO: 8803 - RNA, 9 nt, Artificial Sequence
  shRNA loop sequence
ugugcuguc

SEQ ID NO: 8804 - RNA, 6 nt, Artificial Sequence
  shRNA loop sequence
cucgag

SEQ ID NO: 8805 - RNA, 12 nt, Artificial Sequence
  shRNA loop sequence
cuuccugucaga

SEQ ID NO: 8806 - RNA, 15 nt, Artificial Sequence
  shRNA loop sequence
cuucccuuugucaga

SEQ ID NO: 8807 - RNA, 12 nt, Artificial Sequence
  shRNA loop sequence
guguuauucuug

SEQ ID NO: 8808 - RNA, 12 nt, Artificial Sequence
  shRNA loop sequence
gugucuuaauug

SEQ ID NO: 8809 - RNA, 12 nt, Artificial Sequence
  shRNA loop sequence
guguuagucuug

SEQ ID NO: 8810 - RNA, 7 nt, Artificial Sequence
  shRNA loop sequence
ucaagag

SEQ ID NO: 8811 - RNA, 12 nt, Artificial Sequence
  shRNA loop sequence
ggacauccaggg

SEQ ID NO: 8812 - RNA, 15 nt, Artificial Sequence
  shRNA loop sequence
gugaagccacagaug

SEQ ID NO: 8813 - RNA, 10 nt, Artificial Sequence
  shRNA loop sequence
gauucuaaaa

SEQ ID NO: 8814 - RNA, 23 nt, Artificial Sequence
  5' flank sequence
acaccauguugccagucucuagg

SEQ ID NO: 8815 - RNA, 23 nt, Artificial Sequence
  5' flank sequence
ugauagcaaugucagcagugccu

SEQ ID NO: 8816 - RNA, 23 nt, Artificial Sequence
  5' flank sequence
uauugcuguugacagugagcgac

SEQ ID NO: 8817 - RNA, 21 nt, Artificial Sequence
  3' flank sequence
uggcgucuggcccaaccacac

SEQ ID NO: 8818 - RNA, 21 nt, Artificial Sequence
  3' flank sequence
guaagguugaccauacucuac

SEQ ID NO: 8819 - RNA, 21 nt, Artificial Sequence
  3' flank sequence
ugccuacugccucggacuuca

SEQ ID NO: 8820 - protein, 64 aa, Artificial Sequence
  hinge sequence
YGSQSSKPYLLTHPSDPLELVVSGPSGGPSSPTTGPTSTSGPEDQPLTPTGSDPQSGLGRHLGV

SEQ ID NO: 8821 - protein, 44 aa, Artificial Sequence
  hinge sequence
VVSGPSGGPSSPTTGPTSTSGPEDQPLTPTGSDPQSGLGRHLGV

SEQ ID NO: 8822 - protein, 67 aa, Artificial Sequence
  hinge sequence
AGSGGSGGSGGSPVPSTPPTPSPSTPPTPSPSGGSGNSSGSGGSPVPSTPPTPSPSTPPTPSPSASV

SEQ ID NO: 8823 - protein, 75 aa, Artificial Sequence
  hinge sequence
AGSGGSGGSGGSPVPSTPPTNSSSTPPTPSPSPVPSTPPTNSSSTPPTPSPSPVPSTPPTNSSSTPPTPSPSASV

SEQ ID NO: 8824 - protein, 85 aa, Artificial Sequence
  hinge sequence
VVSGPSGGPSSPTTGPTSTSGPEDQPLTPTGSDPQSGLGRHVVSGPSGGPSSPTTGPTSTSGPEDQPLTPTGSDPQSGLGRHLGV

SEQ ID NO: 8825 - protein, 32 aa, Artificial Sequence
  hinge sequence
TTGPTSTSGPEDQPLTPTGSDPQSGLGRHLGV

SEQ ID NO: 8826 - DNA, 249 bp, Artificial Sequence
  Promoter sequence
gagggcctatttcccatgattccttcatatttgcatatacgatacaaggctgttagagagataattggaattaatttgactgtaaacacaaagatattagtacaaaatacgtgacgtagaaagtaataatttcttgggtagtttgcagttttaaaattatgttttaaaatggactatcatatgcttaccgtaacttgaaagtatttcgatttcttggctttatatatcttgtggaaaggacgaaacacc

SEQ ID NO: 8827 - DNA, 230 bp, Artificial Sequence
  Promoter sequence
ggaattcgaacgctgacgtcatcaacccgctccaaggaatcgcgggcccagtgtcactaggcgggaacacccagcgcgcgtgcgccctggcaggaagatggctgtgagggacaggggagtggcgccctgcaatatttgcatgtcgctatgtgttctgggaaatcaccataaacgtgaaatgtctttggatttgggaatcttataagttctgtatgagaccactctttccc

SEQ ID NO: 8828 - DNA, 243 bp, Artificial Sequence
  Promoter sequence
ctgcagtatttagcatgccccacccatctgcaaggcattctggatagtgtcaaaacagccggaaatcaagtccgtttatctcaaactttagcattttgggaataaatgatatttgctatgctggttaaattagattttagttaaatttcctgctgaagctctagtacgataagtaacttgacctaagtgtaaagttgagatttccttcaggtttatatagcttgtgcgccgcctgggtacctc

SEQ ID NO: 8829 - DNA, 1335 bp, Artificial Sequence
  Promoter sequence
gagtaattcatacaaaaggactcgcccctgccttggggaatcccagggaccgtcgttaaactcccactaacgtagaacccagagatcgctgcgttcccgccccctcacccgcccgctctcgtcatcactgaggtggagaagagcatgcgtgaggctccggtgcccgtcagtgggcagagcgcacatcgcccacagtccccgagaagttggggggaggggtcggcaattgaaccggtgcctagagaaggtggcgcggggtaaactgggaaagtgatgtcgtgtactggctccgcctttttcccgagggtgggggagaaccgtatataagtgcagtagtcgccgtgaacgttctttttcgcaacgggtttgccgccagaacacaggtaagtgccgtgtgtggttcccgcgggcctggcctctttacgggttatggcccttgcgtgccttgaattacttccacgcccctggctgcagtacgtgattcttgatcccgagcttcgggttggaagtgggtgggagagttcgaggccttgcgcttaaggagccccttcgcctcgtgcttgagttgaggcctggcttgggcgctggggccgccgcgtgcgaatctggtggcaccttcgcgcctgtctcgctgctttcgataagtctctagccatttaaaatttttgatgacctgctgcgacgctttttttctggcaagatagtcttgtaaatgcgggccaagatctgcacactggtatttcggtttttggggccgcgggcggcgacggggcccgtgcgtcccagcgcacatgttcggcgaggcggggcctgcgagcgcggccaccgagaatcggacgggggtagtctcaagctggccggcctgctctggtgcctggcctcgcgccgccgtgtatcgccccgccctgggcggcaaggctggcccggtcggcaccagttgcgtgagcggaaagatggccgcttcccggccctgctgcagggagctcaaaatggaggacgcggcgctcgggagagcgggcgggtgagtcacccacacaaaggaaaagggcctttccgtcctcagccgtcgcttcatgtgactccacggagtaccgggcgccgtccaggcacctcgattagttctcgagcttttggagtacgtcgtctttaggttggggggaggggttttatgcgatggagtttccccacactgagtgggtggagactgaagttaggccagcttggcacttgatgtaattctccttggaatttgccctttttgagtttggatcttggttcattctcaagcctcagacagtggttcaaagtttttttcttccatttcaggtgtcgtga

SEQ ID NO: 8830 - protein, 9 aa, Artificial Sequence
  HMH1A MiHA
  X (3)..(3): X can be H or R
VLXDDLLEA

SEQ ID NO: 8831 - RNA, 21 nt, Homo sapiens
cuucuuccuucccuauuaaaa

SEQ ID NO: 8832 - RNA, 21 nt, Homo sapiens
ucucacuccaugagguauuuc

SEQ ID NO: 8833 - RNA, 21 nt, Homo sapiens
cucucacuccaugagguauuu

SEQ ID NO: 8834 - RNA, 21 nt, Homo sapiens
gaggaggaagagcucagauag

SEQ ID NO: 8835 - RNA, 21 nt, Homo sapiens
gcucucacuccaugagguauu

SEQ ID NO: 8836 - RNA, 21 nt, Homo sapiens
aggauuacaucgcccugaaag

SEQ ID NO: 8837 - RNA, 21 nt, Homo sapiens
acaccguccagaggauguaug

SEQ ID NO: 8838 - RNA, 21 nt, Homo sapiens
aggguccuucuuccuggauac

SEQ ID NO: 8839 - RNA, 21 nt, Homo sapiens
ccuacgacggcaaggauuaca

SEQ ID NO: 8840 - RNA, 21 nt, Homo sapiens
ucacuccaugagguauuucuu

SEQ ID NO: 8841 - RNA, 21 nt, Homo sapiens
cuacgacggcaaggauuacau

SEQ ID NO: 8842 - RNA, 21 nt, Homo sapiens
cucacuccaugagguauuucu

SEQ ID NO: 8843 - RNA, 21 nt, Homo sapiens
ggaggaagagcucagauagaa

SEQ ID NO: 8844 - RNA, 21 nt, Homo sapiens
cacaccguccagaggauguau

SEQ ID NO: 8845 - RNA, 21 nt, Homo sapiens
cacgcugucucugaccaugaa

SEQ ID NO: 8846 - RNA, 21 nt, Homo sapiens
cuggacaggagcagagauaca

SEQ ID NO: 8847 - RNA, 21 nt, Homo sapiens
uggaggaggaagagcucagau

SEQ ID NO: 8848 - RNA, 21 nt, Homo sapiens
ggcucucacuccaugagguau

SEQ ID NO: 8849 - RNA, 21 nt, Homo sapiens
caucucugucucaacuucaug

SEQ ID NO: 8850 - RNA, 21 nt, Homo sapiens
uacgacggcaaggauuacauc

SEQ ID NO: 8851 - RNA, 21 nt, Homo sapiens
ggauuacaucgcccugaaaga

SEQ ID NO: 8852 - RNA, 21 nt, Homo sapiens
gauuacaucgcccugaaagag

SEQ ID NO: 8853 - RNA, 21 nt, Homo sapiens
cucagaccaccaagcacaagu

SEQ ID NO: 8854 - RNA, 21 nt, Homo sapiens
ucacaccguccagaggaugua

SEQ ID NO: 8855 - RNA, 21 nt, Homo sapiens
acuccaugagguauuucuuca

SEQ ID NO: 8856 - RNA, 21 nt, Homo sapiens
cacuccaugagguauuucuuc

SEQ ID NO: 8857 - RNA, 21 nt, Homo sapiens
ccaugagguauuucuucacau

SEQ ID NO: 8858 - RNA, 21 nt, Homo sapiens
acuucuuccuucccuauuaaa

SEQ ID NO: 8859 - RNA, 21 nt, Homo sapiens
gugucucucacagcuuguaaa

SEQ ID NO: 8860 - RNA, 21 nt, Homo sapiens
cuguguucguguaggcauaau

SEQ ID NO: 8861 - RNA, 21 nt, Homo sapiens
uguguucguguaggcauaaug

SEQ ID NO: 8862 - RNA, 21 nt, Homo sapiens
uaacuucuuccuucccuauua

SEQ ID NO: 8863 - RNA, 21 nt, Homo sapiens
ucuggacaggagcagagauac

SEQ ID NO: 8864 - RNA, 21 nt, Homo sapiens
uugcuggccugguucucuuug

SEQ ID NO: 8865 - RNA, 21 nt, Homo sapiens
ugucucucacagcuuguaaag

SEQ ID NO: 8866 - RNA, 21 nt, Homo sapiens
acuugaagaacccugacuuug

SEQ ID NO: 8867 - RNA, 21 nt, Homo sapiens
gaagaacccugacuuuguuuc

SEQ ID NO: 8868 - RNA, 21 nt, Homo sapiens
ucuguguucguguaggcauaa

SEQ ID NO: 8869 - RNA, 21 nt, Homo sapiens
cauggugcacugagcuguaac

SEQ ID NO: 8870 - RNA, 21 nt, Homo sapiens
guaacuucuuccuucccuauu

SEQ ID NO: 8871 - RNA, 21 nt, Homo sapiens
caugugcagcaugaggguuug

SEQ ID NO: 8872 - RNA, 21 nt, Homo sapiens
uuguuccugcccuucccuuug

SEQ ID NO: 8873 - RNA, 21 nt, Homo sapiens
acccaguucucacucccauug

SEQ ID NO: 8874 - RNA, 21 nt, Homo sapiens
ggguuuccagagaagccaauc

SEQ ID NO: 8875 - RNA, 21 nt, Homo sapiens
uucucccucucccaaccuaug

SEQ ID NO: 8876 - RNA, 21 nt, Homo sapiens
gucucucacagcuuguaaagu

SEQ ID NO: 8877 - RNA, 21 nt, Homo sapiens
ugugucucucacagcuuguaa

SEQ ID NO: 8878 - RNA, 21 nt, Homo sapiens
gaggaagagcucagauagaaa

SEQ ID NO: 8879 - RNA, 21 nt, Homo sapiens
ugaagaacccugacuuuguuu

SEQ ID NO: 8880 - RNA, 21 nt, Homo sapiens
uugaagaacccugacuuuguu

SEQ ID NO: 8881 - RNA, 21 nt, Homo sapiens
guguucguguaggcauaaugu

SEQ ID NO: 8882 - RNA, 21 nt, Homo sapiens
uggugcacugagcuguaacuu

SEQ ID NO: 8883 - RNA, 21 nt, Homo sapiens
cucccucucccaaccuaugua

SEQ ID NO: 8884 - RNA, 21 nt, Homo sapiens
aggaggaagagcucagauaga

SEQ ID NO: 8885 - RNA, 21 nt, Homo sapiens
accuauguaggguccuucuuc

SEQ ID NO: 8886 - RNA, 21 nt, Homo sapiens
ggguccuucuuccuggauacu

SEQ ID NO: 8887 - RNA, 21 nt, Homo sapiens
gguccuucuuccuggauacuc

SEQ ID NO: 8888 - RNA, 21 nt, Homo sapiens
guccuucuuccuggauacuca

SEQ ID NO: 8889 - RNA, 21 nt, Homo sapiens
aagccaaucagugucgucgcg

SEQ ID NO: 8890 - RNA, 21 nt, Homo sapiens
aagaggaccugcgcucuugga

SEQ ID NO: 8891 - RNA, 21 nt, Homo sapiens
aagugugagacagcugccuug

SEQ ID NO: 8892 - RNA, 21 nt, Homo sapiens
aaggcaccugcaugugucugu

SEQ ID NO: 8893 - RNA, 21 nt, Homo sapiens
aaucaucuuuccuguuccaga

SEQ ID NO: 8894 - RNA, 21 nt, Homo sapiens
aaaggcaccugcaugugucug

SEQ ID NO: 8895 - RNA, 21 nt, Homo sapiens
aaagaggaccugcgcucuugg

SEQ ID NO: 8896 - RNA, 21 nt, Homo sapiens
aaacgcauaugacucaccacg

SEQ ID NO: 8897 - RNA, 19 nt, Homo sapiens
ggaagagcucagauagaaa

SEQ ID NO: 8898 - RNA, 19 nt, Homo sapiens
gggagacacggaaagugaa

SEQ ID NO: 8899 - RNA, 21 nt, Homo sapiens
caccugccaugugcagcauga

SEQ ID NO: 8900 - RNA, 21 nt, Homo sapiens
ggagaucacacugaccuggca

SEQ ID NO: 8901 - RNA, 20 nt, Homo sapiens
ggauuacaucgcccugaaag

SEQ ID NO: 8902 - RNA, 20 nt, Homo sapiens
gcaggaggguccggaguauu

SEQ ID NO: 8903 - RNA, 20 nt, Homo sapiens
ggacggggagacacggaaag

SEQ ID NO: 8904 - RNA, 19 nt, Homo sapiens
gaaagugaaggcccacuca

SEQ ID NO: 8905 - RNA, 20 nt, Homo sapiens
gauaccuggagaacgggaag

SEQ ID NO: 8906 - RNA, 20 nt, Homo sapiens
gcugugguggugccuucugg

SEQ ID NO: 8907 - RNA, 20 nt, Homo sapiens
gcuacuacaaccagagcgag

SEQ ID NO: 8908 - RNA, 19 nt, Homo sapiens
guggcuccgcagauaccug

SEQ ID NO: 8909 - RNA, 19 nt, Homo sapiens
gccaaucagugucgucgcg

SEQ ID NO: 8910 - RNA, 19 nt, Homo sapiens
gaggaccugcgcucuugga

SEQ ID NO: 8911 - RNA, 19 nt, Homo sapiens
gugugagacagcugccuug

SEQ ID NO: 8912 - RNA, 19 nt, Homo sapiens
ggcaccugcaugugucugu

SEQ ID NO: 8913 - RNA, 19 nt, Homo sapiens
ucaucuuuccuguuccaga

SEQ ID NO: 8914 - RNA, 19 nt, Homo sapiens
aggcaccugcaugugucug

SEQ ID NO: 8915 - RNA, 19 nt, Homo sapiens
agaggaccugcgcucuugg

SEQ ID NO: 8916 - RNA, 19 nt, Homo sapiens
acgcauaugacucaccacg

SEQ ID NO: 8917 - protein, 244 aa, Artificial Sequence
  MSLN binding domain
QVQLQESGPGLVKPSQTLSLTCTVSGGSISSGDYYWSWIRQPPGKGLEWIGYIYYSGSTYYNPSLKSRVTISVDTSKNQFSLKLSSVTAADTAVYYCAREDVVKGAFDIWGQGTMVTVSSGGGGSGGGGSGGGGSGGDIQMTQSPSSLSASVGDRVTITCRASQSISSYLNWYQQKPGKAPKLLIYAASSLQSGVPSRFSGSGSGTDFTLTISSLQPEDFATYYCQQSYSTPLTFGGGTKVEIK

SEQ ID NO: 8918 - protein, 195 aa, Artificial Sequence
  CD28-4-1BB-CD3z intracellular domain
RSKRSRLLHSDYMNMTPRRPGPTRKHYQPYAPPRDFAAYRSKRGRKKLLYIFKQPFMRPVQTTQEEDGCSCRFPEEEEGGCELRVKFSRSADAPAYKQGQNQLYNELNLGRREEYDVLDKRRGRDPEMGGKPRRKNPQEGLYNELQKDKMAEAYSEIGMKGERRRGKGHDGLYQGLSTATKDTYDALHMQALPPR

SEQ ID NO: 8919 - protein, 22 aa, Artificial Sequence
  signal sequence
MDMRVPAQLLGLLLLWLRGARC
